(19) United States
(12) Patent Application Publication
(10) Pub. No.: US 2007/0020625 A1
(43) Pub. Date: Jan. 25, 2007

(54) Sequence of the photorhabdus luminescens strain tt01 genome and uses

(76) Inventors: Eric Duchaud, Paris (FR); Sead Taourit, Aulnay-Sous-Bois (FR); Philippe Glaser, Paris (FR); Lionel Frangeul, Paris (FR); Frederik Kunst, Ivry-Sur-Seine (FR); Antoine Danchin, Paris (FR); Carmen Buchrieser, Paris (FR)

Correspondence Address: OBLON, SPIVAK, MCCLELLAND, MAIER & NEUSTADT, P.C., 1940 DUKE STREET, ALEXANDRIA, VA, 22314, US

(21) Appl. No.: 10/467,478

(22) PCT Filed: Feb. 7, 2002
(86) PCT No.: PCT/IB02/03040

§ 371 Date: Feb. 2, 2004

(30) Foreign Application Priority Data
Feb. 7, 2001 (FR) 0101659

(51) Int. Cl. C12Q 1/68; C07H 21/04

(52) U.S. Cl. 435/6; 536/23.7

(57) ABSTRACT

The present invention relates to the genomic sequence and to nucleotide sequences encoding polypeptides of Photorhabdus luminescens. The present invention further relates to polypeptides involved in operons involved in the biosynthesis of antibiotics or toxins, as well as polypeptides with activity of the antibiotic or toxin. Uses of the aforementioned polypeptides in pesticides, bactericides, or fungicides is provides. In addition, the present invention provides vectors, cells, or animals containing the sequences of the present invention.

[0001] The invention relates to the genomic sequence and to nucleotide sequences encoding polypeptides of Photorhabdus luminescens, such as polypeptides involved in operons for biosynthesis of antibiotics, or of toxins, or polypeptides with activity of the toxin or antibiotic type which can be used as a pesticide, bactericide or fungicide, and also to vectors which include said sequences, and to cells or animals transformed with these vectors.

[0002] Photorhabdus luminescens is an entomopathogenic, commensal intestinal bacterium of a nematode and insect parasite. This bacterium is both a model for studying host-parasite interactions and a bacterium which has many industrial applications because of its ability to synthesize numerous toxins (insecticides, bactericides and fungicides) and to secrete numerous enzymes.

[0003] In order to obtain an overall understanding of the genetic determinants involved in these processes, sequencing of the Photorhabdus luminescens genome was carried out.

[0004] The choice of the TT01 strain of Photorhabdus luminescens, subspecies laumondii, the sequencing of whose genome was carried out in the present invention, is very important since this strain has several advantages:
[0005] its genome is stable;
[0006] it can be cultured on a Petri dish;
[0007] it is central in the phylogenetic tree, and therefore representative of the species; and
[0008] its associated nematode is known and cultured (Heterorhabditis bacteriophora HP88, Trinidad).

[0009] The present invention thus relates to the nucleotide and polypeptide sequences of Photorhabdus luminescens strain TT01.

[0010] Thus, an object of the present invention is to disclose the sequence of the genome of Photorhabdus luminescens strain TT01, contained in the genomic library prepared from the genome of this strain and deposited with the CNCM [French National Collection of Cultures and Micro-organisms] on May 12, 2000, under the number I-2478, and of all the genes and noncoding regulatory sequences contained in said genome. Photorhabdus luminescens strain TT01 is also identified in the present application by Photorhabdus luminescens , in an interchangeable manner.

[0011] The invention also relates to novel tools for typing Photorhabdus strains. These tools might be of the DNA “chip” type or of another type. The novel characteristics of these typing tools will be as follows:
[0012] rapidity and simplicity of use;
[0013] high capacity for discriminating between strains; and
[0014] possibility of providing information on the genomic content of the strain analyzed.

[0015] The present invention therefore relates to an isolated nucleotide sequence derived from the Photorhabdus luminescens genome, characterized in that it comprises a sequence chosen from the sequences SEQ ID No. 1 to SEQ ID No. 41 and the sequences SEQ ID No. 5826 to SEQ ID No. 5834.

[0016] The sequences SEQ ID No. 1 to SEQ ID No. 41 represent the sequences of 41 contigs which altogether cover the genomic sequence of Photorhabdus luminescens TT01.

[0017] It has been possible to reassemble these sequences SEQ ID No. 1 to SEQ ID No. 41 and to smooth them back out into 9 new contigs which altogether also cover the genomic sequence of Photorhabdus luminescens TT01. The sequences SEQ ID No. 5826 to SEQ ID No. 5834 represent the sequences of these 9 contigs.

[0018] The nucleotide sequences SEQ ID No. 1 to SEQ ID No. 41 and SEQ ID No. 5826 to SEQ ID No. 5834 were obtained by sequencing the Photorhabdus luminescens TT01 genome using the “shotgun” technique (cf. examples). Despite the great precision of these sequences SEQ ID No. 1 to SEQ ID No. 41 or SEQ ID No. 5826 to SEQ ID No. 5834, it is possible that these sequences do not give a 100% perfect representation, after assembly, of the nucleotide sequence of the Photorhabdus luminescens TT01 genome, and that some rare sequencing errors or indeterminations remain in these sequences. In the present invention, the presence of an indetermination of an amino acid is denoted by “Xaa” and that of a nucleotide is denoted by “N” or “n” in the sequence listing hereinafter. These few rare errors or indeterminations may be easily demonstrated and corrected by those skilled in the art using the whole chromosome and/or its representative fragments according to the invention, and standard methods of amplification, cloning and sequencing, it being possible for the sequences obtained to be easily compared, in particular by means of computer software, and using computer-readable media for recording the sequences according to the invention, as described, for example, below. After correction of these possible rare errors or indeterminations, the corrected nucleotide sequence obtained would still comprise at least 97%, preferably at least 98%, 98.5%, 99% or 99.9%, identity with the genomic sequence obtained after assembly of these nucleotide sequences SEQ ID No. 1 to SEQ ID No. 41 or SEQ ID No. 5826 to SEQ ID No. 5834.

[0019] The present invention also relates to an isolated nucleotide sequence derived from the Photorhabdus luminescens genome, characterized in that it is chosen from:
[0020] a) a nucleotide sequence comprising at least 75%, 80%, 85%, 90%, 95%, 98% or 99% identity with a sequence chosen from the sequences SEQ ID No. 1 to SEQ ID No. 41 or SEQ ID No. 5826 to SEQ ID No. 5834;
[0021] b) a nucleotide sequence comprising a representative fragment of a sequence chosen from the sequences SEQ ID No. 1 to SEQ ID No. 41 or SEQ ID No. 5826 to SEQ ID No. 5834;
[0022] c) a nucleotide sequence complementary to a nucleotide sequence as defined in a) or b);
[0023] d) a nucleotide sequence of the RNA corresponding to one of the sequences as defined in a), b) or c);
[0024] e) a nucleotide sequence as defined in a), b), c) or
[0025] d), which has been modified;
[0026] f) a nucleotide sequence which hybridizes, under high stringency conditions, with a sequence chosen from SEQ ID No. 1 to SEQ ID No. 41 or SEQ ID No. 5826 to SEQ ID No. 5834, and which comprises at least 20 nucleotides, preferably at least 25, 30, 50, 75, 100, 150, 200, 250, 500, 750, 1 000, 1 500, 2 000 or 2 500 nucleotides.

[0027] More particularly, a subject of the present invention is also a nucleotide sequence included in one of the sequences SEQ ID No. 1 to SEQ ID No. 41 or one of the sequences SEQ ID No. 5826 to SEQ ID No. 5834, and in that it encodes a polypeptide chosen from the polypeptides of sequence SEQ ID No. 42 to SEQ ID No. 3855 or from the polypeptides encoded by a sequence SEQ ID No. 5835 to SEQ ID No. 10784.

[0028] Preferably, the polypeptides encoded by one of the sequences SEQ ID No. 5835 to SEQ ID No. 10784 are the polypeptides for which the sequence of at least 5 amino acids is obtained by taking as reading frame the first nucleotide of the sequences SEQ ID No. 5835 to SEQ ID No. 10784.

[0029] Very preferably, a subject of the invention is also a nucleotide sequence, characterized in that it encodes a polypeptide whose function annotated in table I hereinafter, final column, or in table II hereinafter, penultimate column, corresponds to an activity of the toxin and/or antibiotic type, or to an operon involved in the synthesis of a toxin and/or of an antibiotic, which polypeptide is preferably chosen from:

a) the polypeptides of sequences SEQ ID No. 61,

[0030] SEQ ID No. 62, SEQ ID No. 67, SEQ ID No. 171, SEQ ID No. 221, SEQ ID No. 268, SEQ ID No. 288, SEQ ID No. 380, SEQ ID No. 426, SEQ ID No. 438, SEQ ID No. 448, SEQ ID No. 453, SEQ ID No. 455, SEQ ID No. 456, SEQ ID No. 458, SEQ ID No. 501, SEQ ID No. 516, SEQ ID No. 530, SEQ ID No. 542, SEQ ID No. 551, SEQ ID No. 720, SEQ ID No. 761, SEQ ID No. 762, SEQ ID No. 814, SEQ ID No. 859, SEQ ID No. 860, SEQ ID No. 861, SEQ ID No. 862, SEQ ID No. 869, SEQ ID No. 1079, SEQ ID No. 1168, SEQ ID No. 1174, SEQ ID No. 1176, SEQ ID No. 1413, SEQ ID No. 1414, SEQ ID No. 1415, SEQ ID No. 1416, SEQ ID No. 1417, SEQ ID No. 1457, SEQ ID No. 1651, SEQ ID No. 1856, SEQ ID No. 1869, SEQ ID No. 2021, SEQ ID No. 2080, SEQ ID No. 2152, SEQ ID No. 2162, SEQ ID No. 2173, SEQ ID No. 2251, SEQ ID No. 2295, SEQ ID No. 2306, SEQ ID No. 2317, SEQ ID No. 2328, SEQ ID No. 2340, SEQ ID No. 2342, SEQ ID No. 2351, SEQ ID No. 2500, SEQ ID No. 3228, SEQ ID No. 3230, SEQ ID No. 3311, SEQ ID No. 3317, SEQ ID No. 3318, SEQ ID No. 3319, SEQ ID No. 3320, SEQ ID No. 3322, SEQ ID No. 3323, SEQ ID No. 3326, SEQ ID No. 3327, SEQ ID No. 3328, SEQ ID No. 3375, SEQ ID No. 3376, SEQ ID No. 3377, SEQ ID No. 3378, SEQ ID No. 3422, SEQ ID No. 3489, SEQ ID No. 3503, SEQ ID No. 3609, SEQ ID No. 3623, SEQ ID No. 3624, SEQ ID No. 3772, SEQ ID No. 3783, SEQ ID No. 3788 and SEQ ID No. 3794; or

b) the polypeptides encoded by the sequences SEQ ID No. 5835 to SEQ ID No. 10784 homologous to the sequences as defined in a) above, as indicated in the final column of table II.

[0031] These 82 polypeptides of sequence as defined in paragraph a) above, whose function is associated with an activity of the toxin or antibiotic type, or their homologous polypeptide of table II as defined in paragraph b) above, could be identified, for example, by the presence of a consensus motif associated with these functions or by the presence of sequences juxtaposing them on the genome and involved in this type of activity.

[0032] More generally, the present invention also relates to the nucleotide sequences derived from SEQ ID No. 1 to SEQ ID No. 41 or SEQ ID No. 5826 to SEQ ID No. 5834, and encoding a polypeptide of P. luminescens, such that they can be isolated from SEQ ID No. 1 to SEQ ID No. 41 or SEQ ID No. 5826 to SEQ ID No. 5834.

[0033] In addition, the nucleotide sequences characterized in that they comprise a nucleotide sequence chosen from:
[0034] a) a nucleotide sequence encoding a polypeptide chosen from the sequences SEQ ID No. 42 to SEQ ID No. 3855 or from the polypeptides encoded by the sequences SEQ ID No. 5835 to SEQ ID No. 10784, preferably from the 82 polypeptide sequences above selected for their function associated with an activity of the toxin or antibiotic type, or their homologous peptide as defined in table II, in the final column;
[0035] b) a nucleotide sequence comprising at least 75% identity with a nucleotide sequence as defined in a), preferably at least 80%, 85%, 90%, 95%, 98% or 99% identity;
[0036] c) a complementary or RNA nucleotide sequence corresponding to a sequence as defined in a) or b);
[0037] d) a nucleotide sequence of a representative fragment of a sequence as defined in a) or c); and
[0038] e) a sequence as defined in a) or c), which has been modified
   are also subjects of the invention.

[0039] The terms “nucleic acid”, “nucleic acid sequence”, “polynucleotide”, “oligonucleotide”, “polynucleotide sequence” and “nucleotide sequence”, terms which will be used indifferently in the present description, are intended to denote a precise chain of nucleotides, which may or may not be modified, making it possible to define a fragment or a region of a nucleic acid, which may or may not comprise unnatural nucleotides, and which may correspond equally to a double-stranded DNA, a single-stranded DNA and products of transcription of said DNAs. Thus, the nucleic acid sequences according to the invention also encompass PNAs (Peptide Nucleic Acids).

[0040] It should be understood that the present invention does not concern the nucleotide sequences in their natural chromosomal environment, i.e. in their natural state. They are sequences which have been isolated and/or purified, i.e. they have been taken directly or indirectly, for example by copying, their environment having been at least partially modified. The nucleic acids obtained by chemical synthesis are thus also intended to be denoted.

[0041] For the purpose of the present invention, the term “percentage identity” between two nucleic acid or amino acid sequences is intended to denote a percentage of nucleotides or of amino acid residues which are identical between the two sequences to be compared, obtained after best alignment, this percentage being purely statistical and the differences between the two sequences being distributed randomly and over their entire length. The term “best alignment” or “optimal alignment” is intended to denote the alignment for which the percentage identity determined as below is the highest. Sequence comparisons between two nucleic acid or amino acid sequences are conventionally carried out by comparing these sequences after having optimally aligned them, said comparison being carried out by segment or by “window of comparison” so as to identify and compare the local regions of sequence similarity. The optimal alignment of the sequences for the comparison can be carried out, besides manually, by means of the local homology algorithm of Smith and Waterman (1981, Ad. App. Math., 2:482), by means of the local homology algorithm of Neddleman and Wunsch (1970, J. Mol. Biol., 48:443), by means of the similarity search method of Pearson and Lipman (1988, Proc. Natl. Acad. Sci. USA, 85:2444), by means of computer programs using these algorithms (GAP, BESTFIT, BLAST P, BLAST N, FASTA and TFASTA in the Wisconsin Genetics Software Package, Genetics Computer Group, 575 Science Dr., Madison, Wis.). In order to obtain the optimal alignment, the BLAST program is preferably used, with the BLOSUM 62 matrix. The PAM or PAM250 matrices can also be used.

[0042] The percentage identity between two nucleic acid or amino acid sequences is determined by comparing these two sequences when optimally aligned, the nucleic acid or amino acid sequence to be compared possibly comprising additions or deletions with respect to the reference sequence, for optimal alignment between these two sequences. The percentage identity is calculated by determining the number of identical positions for which the nucleotide or amino acid residue is identical in the two sequences, dividing this number of identical positions by the total number of positions compared, and multiplying the result obtained by 100 so as to obtain the percentage identity between these two sequences.

[0043] The expression “nucleic acid sequences exhibiting a percentage identity of at least 75%, preferably 80%, 85%, 90%, 95%, 98% or 99%, after optimal alignment, with a reference sequence” is intended to denote the nucleic acid sequences exhibiting, compared to the reference nucleic acid sequence, certain modifications such as in particular a deletion, a truncation, an extension, a chimeric fusion and/or a substitution, in particular of the point type, and the nucleic acid sequence of which exhibits at least 75%, preferably 80%, 85%, 90%, 95%, 98% or 99%, identity, after optimal alignment, with the reference nucleic acid sequence. They are preferably sequences for which the complementary sequences are capable of hybridizing specifically with the reference sequences. Preferably, the specific or high stringency hybridization conditions will be such that they provide at least 75%, preferably 80%, 85%, 90%, 95%, 98% or 99%, identity, after optimal alignment, between one of the two sequences and the sequence complementary thereto.

[0044] A hybridization under high stringency conditions means that the conditions of temperature and of ionic strength are chosen such that they make it possible to maintain the hybridization between two complementary DNA fragments. By way of illustration, high stringency conditions for the hybridization step for the purposes of defining the polynucleotide fragments described above are advantageously as follows.

[0045] The DNA-DNA or DNA-RNA hybridization is carried out in two steps: (1) prehybridization at 42° C. for 3 hours in phosphate buffer (20 mM, pH 7.5) containing 5×SSC (1×SSC corresponds to a solution of 0.15M NaCl+0.015M sodium citrate), 50% of formamide, 7% of sodium dodecyl sulfate (SDS), 10× Denhardt's, 5% of dextran sulfate and 1% of salmon sperm DNA; (2) hybridization per se for 20 hours at a temperature which depends on the length of the probe (i.e.: 42° C. for a probe>100 nucleotides in length) followed by 2 washes of 20 minutes at 20° C. in 2×SSC+2% SDS and 1 wash of 20 minutes at 20° C. in 0.1×SSC+0.1% SDS. The final wash is carried out in 0.1×SSC+0.1% SDS for 30 minutes at 60° C. for a probe>100 nucleotides in length. The high stringency hybridization conditions described above for a polynucleotide of defined length can be adjusted by those skilled in the art for longer or shorter oligonucleotides, according to the teaching of Sambrook et al. (1989, Molecular cloning: a laboratory manual. 2nd Ed. Cold Spring Harbor).

[0046] In addition, the expression “representative fragment of sequences according to the invention” is intended to denote any nucleotide fragment having at least 15 consecutive nucleotides, preferably at least 20, 25, 30, 50, 75, 100, 150, 200, 300 and 450 consecutive nucleotides, of the sequence from which it is derived.

[0047] The term “representative fragment” is intended to mean in particular a nucleic acid sequence encoding a biologically active fragment of a polypeptide, as defined later.

[0048] The term “representative fragment” is also intended to mean the intergenic sequences, and in particular the nucleotide sequences carrying the regulatory signals (promoters, terminators, or even enhancers, etc).

[0049] Among said representative fragments, preference is given to those having nucleotide sequences corresponding to open reading frames, referred to as ORF sequences, included in general between an initiation codon and a stop codon, or between two stop codons, and encoding polypeptides, preferably with at least 100 amino acids, such as, for example, without being limited thereto, the ORF sequences which will subsequently be described.

[0050] The numbering of the ORF nucleotide sequences which will subsequently be used in the present description corresponds to the numbering of the amino acid sequences of the proteins encoded by said ORFs for the sequences SEQ ID No. 42 to SEQ ID No. 3855. The numbering of the ORF nucleotide sequences SEQ ID No. 5835 to SEQ ID No. 10784 will subsequently be used in the present description for the numbering of the amino acid sequences of the proteins encoded by said ORFs SEQ ID No. 5835 to SEQ ID No. 10784.

[0051] The representative fragments according to the invention can be obtained, for example, by specific amplification such as PCR or after digestion, with suitable restriction enzymes, of nucleotide sequences according to the invention, this method being described in particular in the work by Sambrook et al. Said representative fragments can also be obtained by chemical synthesis when they are not too long, according to methods well known to those skilled in the art.

[0052] The sequences containing sequences of the invention, or representative fragments, are also intended to include the sequences which are naturally framed by sequences which exhibit at least 75%, 80%, 85%, 90%, 95%, 98% or 99% identity with the sequences according to the invention.

[0053] The term “modified nucleotide sequence” is intended to mean any nucleotide sequence obtained by mutagenesis according to techniques well known to those skilled in the art, and comprising modifications compared to the normal sequences, preferably at most 10% of modified nucleotides compared to these normal sequences, for example mutations in the regulatory and/or promoter sequences for expression of the polypeptide, in particular leading to a modification of the level of expression or of the activity of said polypeptide.

[0054] The term “modified nucleotide sequence” is also intended to mean any nucleotide sequence encoding a modified polypeptide as defined below.

[0055] The representative fragments according to the invention can also be probes or primers, which can be used in methods for detecting, identifying, assaying or amplifying nucleic acid sequences.

[0056] For the purpose of the invention, a probe or primer is defined as being a single-stranded nucleic acid fragment or a denatured double-stranded fragment comprising, for example, from 12 bases to a few kb, in particular from 15 to a few hundred bases, preferably from 15 to 50 or 100 bases, and having a specificity of hybridization under given conditions so as to form a hybridization complex with a target nucleic acid.

[0057] The probes and primers according to the invention can be labeled directly or indirectly with a radioactive or nonradioactive compound using methods well known to those skilled in the art, in order to obtain a detectable and/or quantifiable signal (patent FR 78 10975 and bDNA of Chiron EP 225 807 and EP 510 085).

[0058] The unlabeled sequences of polynucleotides according to the invention can be used directly as a probe or primer.

[0059] The sequences are generally labeled to obtain sequences which can be used for many applications. The labeling of the primers or of the probes according to the invention is carried out with radioactive elements or with nonradioactive molecules.

[0060] Among the radioactive isotopes used, mention may be made of ³²P, ³³P ³⁵S, ³H or ¹²⁵I. The nonradioactive entities are selected from ligands such as biotin, avidin, streptavidin or digoxigenin, haptens, dyes, and luminescent agents such as radioluminescent, chemiluminescent, bioluminescent, fluorescent or phosphorescent agents.

[0061] The polynucleotides according to the invention can thus be used as a primer and/or a probe in methods using in particular the PCR (polymerase chain reaction) technique (Rolfs et al., 1991, Berlin: Springer-Verlag). This technique requires choosing pairs of oligonucleotide primers framing the fragment which must be amplified. Reference may, for example, be made to the technique described in U.S. Pat. No. 4,683,202. The amplified fragments can be identified, for example after agarose or polyacrylamide gel electrophoresis, or after a chromatography technique such as gel filtration or ion exchange chromatography, and then sequenced. The specificity of the amplification can be controlled using the nucleotide sequences of polynucleotides of the invention as a matrix, plasmids containing these sequences or else the derived amplification products. The amplified nucleotide fragments can be used as reagents in hybridization reactions in order to demonstrate the presence, in a biological sample, of a target nucleic acid of sequence complementary to that of said amplified nucleotide fragments.

[0062] The invention is also directed toward the nucleic acids which can be obtained by amplification using primers according to the invention.

[0063] Other techniques for amplifying the target nucleic acid can advantageously be employed as an alternative to PCR (PCR-like), using a pair of primers of nucleotide sequences according to the invention. The term “PCR-like” is intended to denote all the methods using direct or indirect reproductions of nucleic acid sequences, or else in which the labeling systems have been amplified; these techniques are, of course, known. In general, they involve amplification of the DNA with a polymerase; when the sample of origin is an RNA, a reverse transcription should be carried out beforehand. A very large number of methods currently exist for this amplification, such as, for example, the SDA (strand displacement amplification) technique (Walker et al., 1992, Nucleic Acids Res., 20:1691), the TAS (transcription-based amplification system) technique described by Kwoh et al. (1989, Proc. Natl. Acad. Sci. USA, 86, 1173), the 3SR (self-sustained sequence replication) technique described by Guatelli et al. (1990, Proc. Natl. Acad. Sci. USA, 87: 1874), the NASBA (nucleic acid sequence based amplification) technique described by Kievitis et al. (1991, J. Virol. Methods, 35, 273), the TMA (transcription mediated amplification) technique, the LCR (ligase chain reaction) technique described by Landegren et al. (1988, Science, 241, 1077), the RCR (repair chain reaction) technique described by Segev (1992, Kessler C. Springer Verlag, Berlin, N.Y., 197-205), the CPR (cycling probe reaction) technique described by Duck et al. (1990, Biotechniques, 9, 142) and the Q-beta-replicase amplification technique described by Miele et al. (1983, J. Mol. Biol., 171, 281). Some of these techniques have since been improved.

[0064] When the target polynucleotide to be detected is an mRNA, an enzyme of the reverse transcriptase type is advantageously used, prior to carrying out an amplification reaction using the primers according to the invention, or to carrying out a method of detection using the probes of the invention, in order to obtain a cDNA from the mRNA contained in the biological sample.

[0065] The cDNA obtained will then serve as a target for the primers or the probes used in the method of amplification or of detection according to the invention.

[0066] The probe hybridization technique can be carried out in various ways (Matthews et al., 1988, Anal. Biochem., 169, 1-25). The most general method consists in immobilizing the nucleic acid, extracted from the cells of various tissues or from cells in culture, on a support (such as nitrocellulose, nylon or polystyrene) and in incubating, under well-defined conditions, the immobilized target nucleic acid with the probe. After hybridization, the excess probe is removed and the hybrid molecules formed are detected by the appropriate method (measurement of the radioactivity, of the fluorescence or of the enzyme activity associated with the probe).

[0067] According to another embodiment of the nucleic acid probes according to the invention, the latter can be used as capture probes. In this case, a probe, termed “capture probe”, is immobilized on a support and is used to capture, by specific hybridization, the target nucleic acid obtained from the biological sample to be tested, and the target nucleic acid is then detected using a second probe, termed “detection probe”, labeled with a readily detectable element.

[0068] Among the advantageous nucleic acid fragments, mention should thus in particular be made of antisense oligonucleotides, i.e. oligonucleotides whose structure provides, by hybridization with the target sequence, inhibition of the expression of the corresponding product. Mention should also be made of sense oligonucleotides which, by interaction with proteins involved in regulating the expression of the corresponding product, will induce either inhibition or activation of this expression.

[0069] Preferably, the probes or primers according to the invention are immobilized on a support in a covalent or noncovalent manner. In particular, the support can be a DNA chip or a high or medium density filter, also a subject of the present invention (patents WO 97/29212, WO 98/27317, WO 97/10365 and WO 92/10588).

[0070] The term “DNA chip” or “high density filter” is intended to denote a support on which are attached DNA sequences, it being possible to pinpoint each one of them by its geographical location. These chips or filters differ mainly by their size, the material of the support and, optionally, the number of DNA sequences which are attached thereto.

[0071] The probes or primers according to the first invention can be attached to solid supports, in particular the DNA chips, by various methods of production. In particular, in situ synthesis can be carried out by photochemical addressing or by inkjet. Other techniques consist in carrying out an ex situ synthesis and attaching the probes to the support of the DNA chip by mechanical or electronic addressing or by inkjet. These various methods are well known to those skilled in the art.

[0072] A nucleotide sequence (probe or primer) according to the invention therefore makes it possible to detect and/or amplify specific nucleic acid sequences. In particular, the detection of these said sequences is facilitated when the probe is attached to a DNA chip or to a high density filter.

[0073] The use of DNA chips or of high density filters in fact makes it possible to determine the gene expression in an organism having a genomic sequence close to P. luminescens, and to type the strain in question.

[0074] The genomic sequence of P. luminescens, supplemented by the identification of the genes of these organisms, as presented in the present invention, serves as a basis for constructing these DNA chips or filters.

[0075] The preparation of these filters or chips consists in synthesizing oligonucleotides, corresponding to the 5′ and 3′ ends of the genes or to more internal fragments, in order to amplify fragments of an appropriate length, for example of between approximately 300 and 800 bases. These oligonucleotides are chosen using the genomic sequence and its annotations disclosed in the present invention. The temperature for pairing these oligonucleotides at the corresponding places on the DNA should be approximately the same for each oligonucleotide. This makes it possible to prepare DNA fragments corresponding to each gene using appropriate PCR conditions in a highly automated environment. The amplified fragments are then immobilized on filters or supports made of glass, silicon or synthetic polymers and these media are used for the hybridization.

[0076] The availability of such filters and/or chips and of the corresponding annotated genomic sequence makes it possible to study the expression of large sets, or even all, of the genes of Photorhabdus luminescens , in particular of P. luminescens TT01, by preparing the complementary DNAs and hybridizing them to the DNA or to the oligonucleotides immobilized on the filters or the chips. Similarly, the filters and/or the chips make it possible to study the strain or species variability by preparing the DNA of these organisms and hybridizing them to the DNA or to the oligonucleotides immobilized on the filters or the chips.

[0077] The differences between the genomic sequences of the various strains or species can greatly affect the intensity of the hybridization and, consequently, disturb the interpretation of the results. It may therefore be necessary to have the precise sequence of the genes of the strain intended to be studied. The method for detecting the genes described later in detail, involving determining the sequence of random fragments of a genome and organizing them according to the sequence of the genome of P. luminescens, in particular of P. luminescens TT01, disclosed in the present invention, may be very useful.

[0078] The nucleotide sequences according to the invention can be used in DNA chips to carry out mutation analysis. This analysis is based on constituting chips capable of analyzing each base of a nucleotide sequence according to the invention. For this purpose, use may in particular be made of the techniques of microsequencing on a DNA chip. The mutations are detected by extension of immobilized primers which hybridize to the matrix of the analyzed sequences, just at a position adjacent to that of the mutated nucleotide sought. A single-stranded, RNA or DNA matrix of the sequences to be analyzed will advantageously be prepared according to conventional methods, using products amplified according to PCR-type techniques. The single-stranded DNA or RNA matrices thus obtained are then deposited onto the DNA chip, under conditions which allow their specific hybridization to the immobilized primers. A thermostable polymerase, for example Tth or Taq DNA polymerase, specifically extends the 3′ end of the immobilized primer with a labeled nucleotide analog complementary to the nucleotide at the position of the variable site; for example, thermocycling is carried out in the presence of fluorescent dideoxyribonucleotides. The experimental conditions will be adjusted in particular to the chips used, to the immobilized primers, to the polymerases used and to the labeling system chosen. One advantage of microsequencing, compared to techniques based on probe hybridization, is that it makes it possible to identify all the variable nucleotides with optimal discrimination under homogeneous reaction conditions; when used on DNA chips, it allows optimal resolution and specificity for the routine and industrial detection of mutations in a multiplex.

[0079] A DNA chip or a filter can be an extremely advantageous tool for determining, detecting and/or identifying a microorganism. Thus, the DNA chips according to the invention which also contain at least one nucleotide sequence of a microorganism other than Photorhabdus luminescens, immobilized on the support of said chip, are also preferred. The microorganism chosen is preferably done so from the bacteria of the genus Photorhabdus (hereinafter referred to as P. luminescens-related bacteria), or the variants of Photorhabdus luminescens TT01.

[0080] A DNA chip or a filter according to the invention is a very useful element of certain kits or sets for detecting and/or identifying microorganisms, in particular bacteria belonging to the species Photorhabdus luminescens , which are also the subject of the invention.

[0081] Moreover, the DNA chips or the filters according to the invention, containing probes or primers specific for Photorhabdus luminescens , are very advantageous elements of kits or sets for detecting and/or quantifying the expression of Photorhabdus luminescens genes.

[0082] Specifically, the control of gene expression is a critical point for optimizing the growth and yield of a strain, either by allowing the expression of one or more new genes, or by modifying the expression of genes already present in the cell. The present invention provides all of the sequences naturally active in P. luminescens which allow gene expression. It thus makes it possible to determine all the sequences expressed in P. luminescens. It also provides a tool for pinpointing the genes whose expression follows a given pattern. To do this, the DNA of all or some of the genes of P. luminescens can be amplified using primers according to the invention, and then attached to a support such as, for example, glass or nylon or a DNA chip, in order to construct a tool for following the expression profile of these genes. This tool, consisting of this support containing the coding sequences, serves as a matrix of hybridization to a mixture of labeled molecules reflecting the messenger RNAs expressed in the cell (in particular the labeled probes according to the invention). By repeating this experiment at various moments and combining all of these data using suitable processing, the expression profiles of all these genes are then obtained. The knowledge of the sequences which follow a given regulatory scheme can also be exploited to search for, in a directed manner, for example by homology, other sequences following, overall, but in a slightly different way, the same regulatory scheme. In addition, it is possible to isolate each control sequence present upstream of the segments acting as probes and to follow the activity thereof using a suitable means such as a reporter gene (luciferase, β-galactosidase, GFP). These isolated sequences can then be modified and assembled by metabolic engineering with sequences of interest with a view to the optimal expression thereof.

[0083] The invention also relates to the polypeptides encoded by a nucleotide sequence according to the invention, preferably by a representative fragment of the preceding sequences, corresponding to an ORF sequence. In particular, the polypeptides of Photorhabdus luminescens TT01 of SEQ ID No. 42 to SEQ ID No. 3855 or encoded by SEQ ID No. 5835 to SEQ ID No. 10784 are a subject of the invention.

[0084] The invention also comprises the polypeptides characterized in that they comprise a polypeptide chosen from:
[0085] a) a polypeptide of sequence SEQ ID No. 42 to SEQ ID No. 3855 or encoded by a sequence SEQ ID No. 5835 to SEQ ID No. 10784;
[0086] b) a polypeptide exhibiting at least 80%, preferably 85%, 90%, 95% and 98%, identity with a polypeptide according to the invention;
[0087] c) a fragment of at least 5 amino acids of a polypeptide as defined in a);
[0088] d) a biologically active fragment of a polypeptide as defined in a); and
[0089] e) a polypeptide as defined in a), b), c) or d), which has been modified.

[0090] The nucleotide sequences encoding the polypeptides described above are also a subject of the invention.

[0091] In the present description, the terms “polypeptides”, “polypeptide sequences”, “peptides” and “proteins” are interchangeable. The term “polypeptide” comprises any amino acid sequence making it possible to generate an antibody response.

[0092] It should be understood that the invention does not concern the polypeptides in natural form, i.e. they are not taken in their natural environment. On the other hand, it concerns those which it has been possible to isolate or obtain by purification from natural sources, or else those obtained by genetic recombination or by chemical synthesis, and they can then comprise unnatural amino acids as will be described below.

[0093] The expression “polypeptide exhibiting a certain percentage identity with another”, for which the expression “homologous polypeptide” will also be used, is intended to denote the polypeptides exhibiting, compared to the natural polypeptides, certain modifications, in particular a deletion, addition or substitution of at least one amino acid, a truncation, an extension, a chimeric solution and/or a mutation, or the polypeptides exhibiting post-translational modifications. Among the homologous polypeptides, preference is given to those in which the amino acid sequence exhibits at least 80%, preferably 85%, 90%, 95%, 98% or 99%, identity, after optimal alignment, with the amino acid sequences of the polypeptides according to the invention. In the case of a substitution, one or more consecutive or nonconsecutive amino acid(s) may be replaced with “equivalent” amino acids. The expression “equivalent amino acids” is here aimed at denoting any amino acid capable of being substituted for one of the amino acids of the basic structure without, however, essentially modifying the biological activities of the corresponding peptides as they will be defined subsequently.

[0094] These equivalent amino acids can be determined either based on their structural homology with the amino acids for which they substitute, or based on results of comparative biological activity assays between the various polypeptides liable to be produced.

[0095] By way of example, mention is made of the substitution possibilities which can be made without this resulting in a profound modification of the biological activity of the corresponding modified polypeptide. It is thus possible to replace leucine with valine or isoleucine, aspartic acid with glutamic acid, glutamine with asparagine, arginine with lysine, etc, it naturally being possible to envision the reverse substitutions under the same conditions.

[0096] The homologous polypeptides also correspond to the polypeptides encoded by the nucleotide sequences which exhibit a certain percentage identity with the nucleotide sequences of the invention or which are identical, as previously defined, and thus comprise, in the present definition, mutated polypeptides or polypeptides corresponding to inter- or intraspecies variations which can exist in Photorhabdus, and which correspond in particular to truncations, substitutions, deletions and/or additions of at least one amino acid residue.

[0097] It is understood that the percentage identity between two polypeptides is calculated in the same way as between two nucleic acid sequences. Thus, the percentage identity between two polypeptides is calculated, after optimal alignment of these two sequences, on a window of maximum homology. To define said window of maximum homology, the same algorithms as for the nucleic acid sequences can be used.

[0098] The expression “biologically active fragment of a polypeptide according to the invention” is intended to denote in particular a polypeptide fragment, as defined below, exhibiting at least one of the biological characteristics of the polypeptides according to the invention, in particular in that it is capable of exerting, in general, even a partial activity, such as, for example:
[0099] an enzymatic (metabolic) activity or an activity which may be involved in the biosynthesis or the biodegradation of organic or inorganic compounds, or preferably a toxic or antibiotic activity, in particular for insects or microorganisms (bacteria or fungi), or else an activity involved in the biosynthesis of these toxins or antibiotics; such proteins with enzymatic activity may in particular be used in methods for screening and/or selecting compounds capable of modifying this activity, in particular of inhibiting it;
[0100] a structural activity (cell envelope, chaperone molecule, ribosome). Proteins corresponding especially to extramembrane proteins may in particular be used as an immunogen for producing mono- or polyclonal antibodies directed specifically against these extramembrane proteins;
[0101] a transport activity (energy transport, ion transport); or an activity in protein secretion;
[0102] an activity in the process of replication, amplification, preparation, transcription, translation or maturation, in particular of DNA, of RNA or of proteins.

[0103] The expression “polypeptide fragment according to the invention” is intended to denote a polypeptide comprising at least 5 amino acids, preferably 10, 15, 25, 50, 100 and 150 amino acids.

[0104] The polypeptide fragments can correspond to isolated or purified fragments naturally present in the strains of Photorhabdus, or to fragments which can be obtained by cleavage of said polypeptide with a proteolytic enzyme, such as trypsin or chymotrypsin or collagenase, or with a chemical reagent (cyanogen bromide, CNBr) or by placing said polypeptide in a very acidic environment (for example at pH=2.5). Polypeptide fragments can also be prepared by chemical synthesis, from hosts transformed with an expression vector according to the invention which contain a nucleic acid which allows expression of said fragment and is placed under the control of the appropriate regulatory and/or expression elements.

[0105] The term “modified polypeptide” of a polypeptide according to the invention is intended to denote a polypeptide obtained by genetic recombination or by chemical synthesis as described later, which exhibits at least one modification compared to the normal sequence, and preferably at most 10% of modified amino acids compared to the normal sequence. These modifications may in particular be made on amino acids necessary for the specificity or the effectiveness of the activity, or responsible for the structural conformation, for the charge or for the hydrophobicity of the polypeptide according to the invention. It is thus possible to create polypeptides with equivalent, increased or decreased activity, or with equivalent, stricter or broader specificity. Among the modified polypeptides, mention should be made of the polypeptides in which up to five amino acids can be modified, truncated at the N- or C-terminal end, or else deleted, or added.

[0106] As is indicated, the aim of the modifications to a polypeptide is in particular:
[0107] to allow its use in methods of biosynthesis or of biodegradation of organic or inorganic compounds, or in the biosynthesis of toxins or of antibiotics,
[0108] to allow its use in methods of replication, of amplification, of repair and of regulation of transcription, translation or maturation in particular of DNA, RNA or proteins; to allow its enhanced secretion,
[0109] to modify its solubility, or the effectiveness or specificity of its activity, or else to facilitate its purification.

[0110] Chemical synthesis also has the advantage of being able to use unnatural amino acids or nonpeptide bonds. Thus, it may be advantageous to use unnatural amino acids, for example in the D form, or amino acid analogs, in particular sulfur-containing forms.

[0111] The invention also relates to the nucleic acid or peptide sequences according to the present invention with the exception of the nucleic acid or peptide sequences described in documents WO 99/54472, WO 99/42589, WO 99/03328, WO 98/08932 and EP 0 823 215.

[0112] The present invention provides the nucleotide sequence of the Photorhabdus luminescens TT01 genome in the form of 41 contigs or in the form of 9 contigs, and also some polypeptide sequences.

[0113] The nucleic acid or peptide sequences below, characterized by their function, can also be identified by their nucleotide and amino acid sequence with reference to table I.

[0114] Preferably, the invention relates to a nucleotide sequence according to the invention, characterized in that it encodes a polypeptide of Photorhabdus luminescens TT01 with activity of the toxin and/or antibiotic type, or involved in the synthesis of these toxins and/or antibiotics.

[0115] Preferably, the invention relates to a nucleotide sequence according to the invention, characterized in that it encodes a polypeptide of Photorhabdus luminescens TT01, or one of its fragments, involved in amino acid biosynthesis.

[0116] Preferably, the invention relates to a nucleotide sequence according to the invention, characterized in that it encodes a polypeptide of Photorhabdus luminescens TT01, or one of its fragments, involved in the biosynthesis of cofactors, prosthetic groups and transporters.

[0117] Preferably, the invention relates to a nucleotide sequence according to the invention, characterized in that it encodes a cell envelope polypeptide or a polypeptide present at the surface of Photorhabdus luminescens TT01, or one of its fragments.

[0118] Preferably, the invention relates to a nucleotide sequence according to the invention, characterized in that it encodes a polypeptide of Photorhabdus luminescens TT01, or one of its fragments, involved in the cellular machinery.

[0119] Preferably, the invention relates to a nucleotide sequence according to the invention, characterized in that it encodes a polypeptide of Photorhabdus luminescens TT01, or one of its fragments, involved in central intermediate metabolism.

[0120] Preferably, the invention relates to a nucleotide sequence according to the invention, characterized in that it encodes a polypeptide of Photorhabdus luminescens TT01, or one of its fragments, involved in energy metabolism.

[0121] Preferably, the invention relates to a nucleotide sequence according to the invention, characterized in that it encodes a polypeptide of Photorhabdus luminescens TT01, or one of its fragments, involved in fatty acid and phospholipid metabolism.

[0122] Preferably, the invention relates to a nucleotide sequence according to the invention, characterized in that it encodes a polypeptide of Photorhabdus luminescens TT01, or one of its fragments, involved in the metabolism of nucleotides, purines, pyrimidines or nucleosides.

[0123] Preferably, the invention relates to a nucleotide sequence according to the invention, characterized in that it encodes a polypeptide of Photorhabdus luminescens TT01, or one of its fragments, involved in regulatory functions.

[0124] Preferably, the invention relates to a nucleotide sequence according to the invention, characterized in that it encodes a polypeptide of Photorhabdus luminescens TT01, or one of its fragments, involved in the replication process.

[0125] Preferably, the invention relates to a nucleotide sequence according to the invention, characterized in that it encodes a polypeptide of Photorhabdus luminescens TT01, or one of its fragments, involved in the transcription process.

[0126] Preferably, the invention relates to a nucleotide sequence according to the invention, characterized in that it encodes a polypeptide of Photorhabdus luminescens TT01, or one of its fragments, involved in the translation process.

[0127] Preferably, the invention relates to a nucleotide sequence according to the invention, characterized in that it encodes a polypeptide of Photorhabdus luminescens TT01, or one of its fragments, involved in the process of protein transport and binding.

[0128] Preferably, the invention relates to a nucleotide sequence according to the invention, characterized in that it encodes a polypeptide of Photorhabdus luminescens TT01, or one of its fragments, involved in adaptation to atypical conditions.

[0129] Preferably, the invention relates to a nucleotide sequence according to the invention, characterized in that it encodes a polypeptide of Photorhabdus luminescens TT01, or one of its fragments, [lacuna] in sensitivity to medicinal products and analogs.

[0130] Preferably, the invention relates to a nucleotide sequence according to the invention, characterized in that it encodes a polypeptide of Photorhabdus luminescens TT01, or one of its fragments, involved in functions relating to transposons.

[0131] Preferably, the invention relates to a nucleotide sequence according to the invention, characterized in that it encodes a polypeptide specific for Photorhabdus luminescens TT01, or one of its fragments.

[0132] In another aspect, a subject of the invention is preferably a polypeptide according to the invention, characterized in that it is a polypeptide of Photorhabdus luminescens TT01, or one of its fragments, [lacuna] activity of the toxin and/or antibiotic type, or involved in the synthesis of these toxins and/or antibiotics.

[0133] In another aspect, a subject of the invention is preferably a polypeptide according to the invention, characterized in that it is a polypeptide of Photorhabdus luminescens TT01, or one of its fragments, involved in amino acid biosynthesis.

[0134] In another aspect, a subject of the invention is preferably a polypeptide according to the invention, characterized in that it is a polypeptide of Photorhabdus luminescens TT01, or one of its fragments, involved in the biosynthesis of cofactors, prosthetic groups and transporters.

[0135] In another aspect, a subject of the invention is preferably a polypeptide according to the invention, characterized in that it is a cell envelope polypeptide or a surface polypeptide of Photorhabdus luminescens TT01, or one of its fragments.

[0136] In another aspect, a subject of the invention is preferably a polypeptide according to the invention, characterized in that it is a polypeptide of Photorhabdus luminescens TT01, or one of its fragments, involved in the cellular machinery.

[0137] In another aspect, a subject of the invention is preferably a polypeptide according to the invention, characterized in that it is a polypeptide of Photorhabdus luminescens TT01, or one of its fragments, involved in central intermediate metabolism.

[0138] In another aspect, a subject of the invention is preferably a polypeptide according to the invention, characterized in that it is a polypeptide of Photorhabdus luminescens TT01, or one of its fragments, involved in energy metabolism.

[0139] In another aspect, a subject of the invention is preferably a polypeptide according to the invention, characterized in that it is a polypeptide of Photorhabdus luminescens TT01, or one of its fragments, involved in fatty acid and phospholipid metabolism.

[0140] In another aspect, a subject of the invention is preferably a polypeptide according to the invention, characterized in that it is a polypeptide of Photorhabdus luminescens TT01, or one of its fragments, involved in the metabolism of nucleotides, purines, pyrimidines or nucleosides.

[0141] In another aspect, a subject of the invention is preferably a polypeptide according to the invention, characterized in that it is a polypeptide of Photorhabdus luminescens TT01, or one of its fragments, involved in regulatory functions.

[0142] In another aspect, a subject of the invention is preferably a polypeptide according to the invention, characterized in that it is a polypeptide of Photorhabdus luminescens TT01, or one of its fragments, involved in the replication process.

[0143] In another aspect, a subject of the invention is preferably a polypeptide according to the invention, characterized in that it is a polypeptide of Photorhabdus luminescens TT01, or one of its fragments, involved in the transcription process.

[0144] In another aspect, a subject of the invention is preferably a polypeptide according to the invention, characterized in that it is a polypeptide of Photorhabdus luminescens TT01, or one of its fragments, involved in the translation process.

[0145] In another aspect, a subject of the invention is preferably a polypeptide according to the invention, characterized in that it is a polypeptide of Photorhabdus luminescens TT01, or one of its fragments, involved in the process of protein transport and binding.

[0146] In another aspect, a subject of the invention is preferably a polypeptide according to the invention, characterized in that it is a polypeptide of Photorhabdus luminescens TT01, or one of its fragments, involved in adaptation to atypical conditions.

[0147] In another aspect, a subject of the invention is preferably a polypeptide according to the invention, characterized in that it is a polypeptide of Photorhabdus luminescens TT01, or one of its fragments, [lacuna] in sensitivity to medicinal products and analogs.

[0148] In another aspect, a subject of the invention is preferably a polypeptide according to the invention, characterized in that it is a polypeptide of Photorhabdus luminescens TT01, or one of its fragments, involved in functions relating to transposons.

[0149] In another aspect, a subject of the invention is preferably a polypeptide according to the invention, characterized in that it is a polypeptide specific for Photorhabdus luminescens TT01, or one of its fragments.

[0150] A subject of the invention is also the operons involved in the synthesis of antibiotics and/or of toxins.

[0151] Table I provides the list of some polypeptides according to the invention, and also their location in the contigs represented by SEQ ID No. 1 to SEQ ID No. 41, and the similarities observed after comparison in the databases.

[0152] Table II provides the list of some polypeptides according to the invention, and also their location in the contigs represented by SEQ ID No. 5826 to SEQ ID No. 5834, and the similarities observed after comparison in the databases. In table II, contigs 1 to 9 are identified by the sequences SEQ ID No. 5826 to SEQ ID No. 5834.

[0153] Entirely preferably, a subject of the invention is also the polypeptides whose functions annotated in table I, final column, or whose functions annotated in table II, penultimate column, correspond to activities of the toxin and/or antibiotic type, or to polypeptides involved in the synthesis of these toxins and/or antibiotics, which polypeptides are preferably chosen from:

a) the polypeptides of sequence SEQ ID No. 61,

[0154] SEQ ID No. 62, SEQ ID No. 67, SEQ ID No. 171, SEQ ID No. 221, SEQ ID No. 268, SEQ ID No. 288, SEQ ID No. 380, SEQ ID No. 426, SEQ ID No. 438, SEQ ID No. 448, SEQ ID No. 453, SEQ ID No. 455, SEQ ID No. 456, SEQ ID No. 458, SEQ ID No. 501, SEQ ID No. 516, SEQ ID No. 530, SEQ ID No. 542, SEQ ID No. 551, SEQ ID No. 720, SEQ ID No. 761, SEQ ID No. 762, SEQ ID No. 814, SEQ ID No. 859, SEQ ID No. 860, SEQ ID No. 861, SEQ ID No. 862, SEQ ID No. 869, SEQ ID No. 1079, SEQ ID No. 1168, SEQ ID No. 1174, SEQ ID No. 1176, SEQ ID No. 1413, SEQ ID No. 1414, SEQ ID No. 1415, SEQ ID No. 1416, SEQ ID No. 1417, SEQ ID No. 1457, SEQ ID No. 1651, SEQ ID No. 1856, SEQ ID No. 1869, SEQ ID No. 2021, SEQ ID No. 2080, SEQ ID No. 2152, SEQ ID No. 2162, SEQ ID No. 2173, SEQ ID No. 2251, SEQ ID No. 2295, SEQ ID No. 2306, SEQ ID No. 2317, SEQ ID No. 2328, SEQ ID No. 2340, SEQ ID No. 2342, SEQ ID No. 2351, SEQ ID No. 2500, SEQ ID No. 3228, SEQ ID No. 3230, SEQ ID No. 3311, SEQ ID No. 3317, SEQ ID No. 3318, SEQ ID No. 3319, SEQ ID No. 3320, SEQ ID No. 3322, SEQ ID No. 3323, SEQ ID No. 3326, SEQ ID No. 3327, SEQ ID No. 3328, SEQ ID No. 3375, SEQ ID No. 3376, SEQ ID No. 3377, SEQ ID No. 3378, SEQ ID No. 3422, SEQ ID No. 3489, SEQ ID No. 3503, SEQ ID No. 3609, SEQ ID No. 3623, SEQ ID No. 3624, SEQ ID No. 3772, SEQ ID No. 3783, SEQ ID No. 3788 and SEQ ID No. 3794;

or

b) the polypeptides encoded by the sequences SEQ ID No. 5835 to SEQ ID No. 10784, homologous to the sequences as defined in a), as indicated in the final column of table II.

[0155] The subject of the present invention is also the nucleotide and/or polypeptide sequences according to the invention, characterized in that said sequences are recorded on a recording medium, the form and nature of which facilitate the reading, analysis and/or exploitation of said sequence(s). These media may also contain other information extracted from the present invention, in particular the similarities with already known sequences, and/or information concerning the nucleotide and/or polypeptide sequences of a cell of a plant, of an animal or of a microorganism other than P. luminescens, in particular a cell or microorganism sensitive to a toxin or an antibiotic produced by P. luminescens, a bacterium of the genus Photorhabdus, or a variant of P. luminescens, in order to facilitate the comparative analysis and the exploitation of the results obtained.

[0156] Among these said recording media, preference is given in particular to computer-readable media, such as magnetic, optical, electrical or hybrid media, in particular computer disks, CD-ROMs and computer servers. Such recording media are also a subject of the invention.

[0157] The recording media according to the invention, with the information provided, are very useful for choosing nucleotide primers or probes for determining genes in Photorhabdus luminescens TT01 or strains related to this organism. Similarly, the use of these media for studying the genetic polymorphism of strains related to Photorhabdus luminescens TT01, in particular by determining the regions of colinearity, is very useful insofar as these media provide not only the nucleotide sequence of the Photorhabdus luminescens TT01 genome, but also the genomic organization in said sequence. Thus, the uses of recording media according to the invention are also subjects of the invention.

[0158] The analysis of homology between various sequences is in fact advantageously performed using sequence comparison programs, such as the Blast program, or the programs of the GCG package, described above.

[0159] The invention is also directed toward the cloning and/or expression vectors which contain a nucleotide sequence according to the invention.

[0160] The vectors according to the invention preferably comprise elements which allow the expression and/or the secretion of the nucleotide sequences in a given host cell.

[0161] The vector should then comprise a promoter, translation initiation and termination signals, and also regions suitable for regulating transcription. It must be possible for it to be maintained stably in the host cell and it may optionally contain particular signals which specify secretion of the translated protein. These various elements are chosen and optimized by those skilled in the art as a function of the cellular host used. To this effect, the nucleotide sequences according to the invention can be inserted into vectors which replicate autonomously in the host chosen, or may be vectors which integrate in the host chosen.

[0162] Such vectors are prepared by methods commonly used by those skilled in the art, and the resulting clones can be introduced into a suitable host by standard methods, such as lipofection, electroporation, heat shock or chemical methods.

[0163] The vectors according to the invention are, for example, vectors of plasmid or viral origin. They are useful for transforming host cells in order to clone or express the nucleotide sequences according to the invention.

[0164] Among these vectors, preference is also given to the cloning and/or expression vectors according to the invention, characterized in that they contain a nucleotide sequence chosen from the sequences SEQ ID No. 3856 to SEQ ID No. 5825, and SEQ ID No. 5835 to SEQ ID No. 10784, or their fragment derived from the P. luminescens genome, in particular the sequences encoding the polypeptides with toxin or antibiotic activity or involved in these activities, in particular those mentioned above whose functions annotated in table I below correspond to these activities.

[0165] The invention also comprises the host cells transformed with a vector according to the invention.

[0166] The cellular host may be chosen from prokaryotic or eukaryotic systems, for example bacterial cells, but also yeast cells or animal cells, in particular mammalian cells. Insect cells or plant cells may also be used. The preferred host cells according to the invention are in particular prokaryotic cells, preferably bacteria belonging to the genus Photorhabdus or to the species Photorhabdus luminescens , more particularly Photorhabdus luminescens TT01.

[0167] The invention also relates to the plants and animals, except humans, which comprise a transformed cell according to the invention. The transformed cells according to the invention can be used in methods for preparing recombinant polypeptides according to the invention. The methods for preparing a polypeptide according to the invention in recombinant form, characterized in that they use a vector and/or a cell transformed with a vector according to the invention, are themselves included in the present invention. Preferably, a cell transformed with a vector according to the invention is cultured under conditions which allow the expression of said polypeptide, and said recombinant polypeptide is recovered.

[0168] As has been mentioned, the cellular host can be chosen from prokaryotic or eukaryotic systems. In particular, it is possible to identify nucleotide sequences according to the invention which facilitate secretion in such a prokaryotic or eukaryotic system. A vector according to the invention carrying such a sequence can therefore be advantageously used for producing recombinant proteins intended to be secreted. As a result, the purification of these recombinant proteins of interest will be facilitated by the fact that they are present in the cell culture supernatant rather than inside the host cells.

[0169] The polypeptides according to the invention may also be prepared by chemical synthesis. Such a method of preparation is also a subject of the invention. Those skilled in the art are aware of the methods of chemical synthesis, for example the techniques using solid phases (see in particular Steward et al., 1984, Solid phase peptides synthesis, Pierce Chem. Company, Rockford, 111, 2nd ed., (1984)) or techniques using partial solid phases, by fragment condensation or by conventional synthesis in solution. The polypeptides obtained by chemical synthesis, and possibly comprising corresponding unnatural amino acids, are also included in the invention.

[0170] The hybrid polypeptides according to the invention are very useful for obtaining monoclonal or polyclonal antibodies capable of specifically recognizing the polypeptides according to the invention.

[0171] These specific polyclonal or monoclonal antibodies can be obtained by the standard methods well known to those skilled in the art, after immunizing a mammal using these polypeptides (or their corresponding nucleic acid) or, for example, according to the conventional method of hybridoma culture described by Köhler and Milstein (1975, Nature, 256, 495) for the monoclonal antibodies.

[0172] Such monoclonal or polyclonal antibodies, their fragments, or the chimeric antibodies, which recognize the polypeptides according to the invention, are also subjects of the invention.

[0173] The antibodies according to the invention are, for example, chimeric antibodies, humanized antibodies, or Fab or F(ab′)² fragments. They can also be in the form of immunoconjugates or of antibodies which are labeled in order to obtain a detectable and/or quantifiable signal.

[0174] Thus, the antibodies according to the invention can be used in a method for detecting and/or identifying bacteria belonging to the genus Photorhabdus and/or to the species Photorhabdus luminescens , in a biological sample, characterized in that it comprises the following steps:
[0175] a) bringing the biological sample into contact with an antibody according to the invention;
[0176] b) demonstrating the antigen-antibody complex possibly formed.

[0177] The antibodies according to the invention can also be used in order to detect expression of a gene of Photorhabdus luminescens TT01. Specifically, the presence of the expression product of a gene recognized by an antibody specific for said expression product can be detected by the presence of an antigen-antibody complex formed after the Photorhabdus luminescens strain TT01 has been brought into contact with an antibody according to the invention. The bacterial strain used may have been “prepared”, i.e. centrifuged, lyzed and/or placed in an appropriate reagent for constituting the medium suitable for the immunoreaction. In particular, preference is given to a method for detecting expression in the gene, corresponding to Western blotting, which may be performed after polyacrylamide gel electrophoresis of a lysate of the bacterial strain, in the presence or absence of reducing conditions (SDS-PAGE). After migration and separation of the proteins on the polyacrylamide gel, said proteins are transferred onto a suitable membrane (for example made of nylon) and the presence of the protein or of the polypeptide of interest is detected by bringing said membrane into contact with an antibody according to the invention.

[0178] Thus, the present invention also comprises the kits or sets for carrying out a method as described (for detecting the expression of a gene of Photorhabdus luminescens TT01, or for detecting and/or identifying bacteria belonging to the species Photorhabdus luminescens), comprising the following elements:
[0179] a) a polyclonal or monoclonal antibody according to the invention;
[0180] b) optionally, the reagents for constituting the medium suitable for the immunoreaction;
[0181] c) optionally, the reagents for demonstrating the antigen-antibody complexes produced by the immunoreaction.

[0182] The polypeptides and the antibodies according to the invention can advantageously be immobilized on a support, in particular a protein chip. Such a protein chip is the subject of the invention and may also contain at least one polypeptide of a microorganism other than Photorhabdus luminescens , or an antibody directed against a compound of a microorganism other than Photorhabdus luminescens .

[0183] The protein chips or high density filters containing proteins according to the invention can be constructed in the same way as the DNA chips according to the invention. In practice, it is possible to carry out the synthesis of the polypeptides directly attached to the protein chip, or to carry out an ex situ synthesis followed by a step of attaching the synthesized polypeptide to said chip. The latter method is preferable when the intention is to attach proteins of considerable size to the support, these proteins being advantageously prepared by genetic engineering. However, if the intention is to attach only peptides to the support of said chip, it may be more advantageous to synthesize said peptides directly in situ.

[0184] The protein chips according to the invention can advantageously be used in kits or sets for detecting and/or identifying bacteria related to the species Photorhabdus luminescens , or to a microorganism, or more generally in kits or sets for detecting and/or identifying microorganisms. When the polypeptides according to the invention are attached to DNA chips, the presence of antibodies in the samples tested is sought, the attachment of an antibody according to the invention to the support of said protein chip allowing identification of the protein for which said antibody is specific.

[0185] Preferably, an antibody according to the invention is attached to the support of the protein chip, and the presence of the corresponding antigen, specific for Photorhabdus luminescens , is detected.

[0186] A protein chip described above can be used to detect gene products, in order to establish an expression profile for said genes, in addition to a DNA chip according to the invention. The protein chips according to the invention are also extremely useful for proteomic experiments which study interactions between the various proteins of a cell of a plant, of an animal, such as an insect, or of a microorganism other than P. luminescens.

[0187] Thus, the invention also comprises a protein chip according to the invention, characterized in that it also contains at least one polypeptide of a cell of a plant, of an animal or of a microorganism other than P. luminescens, immobilized on the support of said chip, preferably said cell or other microorganism is chosen from a cell or microorganism sensitive to a toxin or an antibiotic produced by P. luminescens.

[0188] In a simplified manner, representative peptides of the various proteins of an organism are attached to a support. Said support is then brought into contact with labeled proteins and, after an optional rinsing step, interactions between said labeled proteins and the peptides attached to the protein chip are detected.

[0189] Thus, the protein chips comprising a polypeptide sequence according to the invention or an antibody according to the invention are a subject of the invention, as are the kits or sets containing them.

[0190] The present invention also covers a method for detecting and/or identifying bacteria belonging to the species Photorhabdus luminescens , in a biological sample, which uses a nucleotide sequence according to the invention.

[0191] It should be understood that, in the present invention, the term “biological sample” concerns samples taken from a living organism (in particular blood, tissues, organs or others taken from a mammal) or a sample containing biological material, i.e. DNA or RNA. Such a biological sample also comprises food compositions containing bacteria (for example cheeses, dairy products), but also food compositions containing yeasts (beers, breads) or others. The term “biological sample” also concerns bacteria isolated from these samples or food compositions.

[0192] The method of detection and/or identification using the nucleotide sequences according to the invention may be diverse in nature.

[0193] A method comprising the following steps is preferred:
[0194] a) optionally isolating the DNA from the biological sample to be analyzed, or obtaining a cDNA from the RNA of the biological sample;
[0195] b) specifically amplifying the DNA of bacteria belonging to the species Photorhabdus luminescens using at least one primer according to the invention;
[0196] c) demonstrating the amplification products.

[0197] This method is based on the specific amplification of the DNA, in particular via a chain amplification reaction.

[0198] A method comprising the following steps is also preferred:
[0199] a) bringing a nucleotide probe according to the invention into contact with a biological sample, the nucleic acid contained in the biological sample having, where appropriate, previously been made accessible to hybridization, under conditions which allow hybridization of the probe to the nucleic acid of a bacterium belonging to the species Photorhabdus luminescens ;
[0200] b) demonstrating the hybrid possibly formed between the nucleotide probe and the DNA of the biological sample.

[0201] Such a method should not be limited to detecting the presence of the DNA contained in the biological sample to be tested, it can also be used to detect the RNA contained in said sample. This method encompasses in particular Southern and Northern blotting.

[0202] Another preferred method according to the invention comprises the following steps:
[0203] a) bringing a nucleotide probe immobilized on a support according to the invention into contact with a biological sample, the nucleic acid of the sample having, where appropriate, previously been made accessible to hybridization, under conditions which allow hybridization of the probe to the nucleic acid of a bacterium belonging to the species Photorhabdus luminescens ;
[0204] b) bringing the hybrid formed between the nucleotide probe immobilized on a support and the nucleic acid contained in the biological sample, where appropriate after removing the DNA of the biological sample which has not hybridized with the probe, into contact with a labeled nucleotide probe according to the invention;
[0205] c) demonstrating the new hybrid formed in step b).

[0206] This method is advantageously used with a DNA chip according to the invention, the nucleic acid being sought hybridizing with a probe present at the surface of said chip, and being detected using a labeled probe. This method is advantageously carried out by combining a prior step of amplifying the DNA or the complementary DNA optionally obtained by reverse transcription, using primers according to the invention.

[0207] Thus, the present invention also encompasses the kits or sets for detecting and/or identifying bacteria belonging to the species Photorhabdus luminescens , characterized in that it comprises the following elements:
[0208] a) a nucleotide probe according to the invention;
[0209] b) optionally, the reagents required for carrying out a hybridization reaction;
[0210] c) optionally, at least one primer according to the invention and also the reagents required for a DNA amplification reaction.

[0211] Similarly, the present invention also encompasses the kits or sets for detecting and/or identifying bacteria belonging to the species Photorhabdus luminescens TT01, characterized in that it comprises the following elements:
[0212] a) a nucleotide probe, termed capture probe, according to the invention;
[0213] b) an oligonucleotide probe, termed detection probe, according to the invention;
[0214] c) optionally, at least one primer according to the invention and also the reagents required for a DNA amplification reaction.

[0215] Finally, the kits or sets for detecting and/or identifying bacteria belonging to the species Photorhabdus luminescens , characterized in that they comprise the following elements:
[0216] a) at least one primer or one probe according to the invention;
[0217] b) optionally, the reagents required to carry out a DNA amplification reaction;
[0218] c) optionally, a component for verifying the sequence of the amplified fragment, more particularly an oligonucleotide probe according to the invention, are also subjects of the present invention.

[0219] Preferably, said primers and/or probes and/or polypeptides and/or antibodies according to the present invention, used in the methods and/or kits or sets according to the present invention, are chosen from the primers and/or probes and/or polypeptides and/or antibodies specific for the species Photorhabdus luminescens. Preferably, these elements are chosen from the nucleotide sequences encoding a secreted protein, from the secreted polypeptides, or from the antibodies directed against secreted polypeptides of Photorhabdus luminescens.

[0220] A subject of the present invention is also the strains of Photorhabdus luminescens TT01 containing one or more mutation(s) in a nucleotide sequence according to the invention, in particular an ORF sequence, or regulatory elements thereof (in particular promoters).

[0221] According to the invention, preference is given to the strains of Photorhabdus luminescens TT01 exhibiting one or more mutation(s) in the nucleotide sequences encoding polypeptides preferably with activity of the toxin or antibiotic type, or involved in their biosynthesis, or else, in another aspect, involved in the cellular machinery, in particular secretion, central intermediate metabolism, energy metabolism, and processes of amino acid synthesis, of transcription and of translation, and of polypeptide synthesis.

[0222] Said mutations may lead to inactivation of the gene or, in particular, when they are located in the regulatory elements of said gene, to overexpression of this gene.

[0223] According to the present invention, the strains of Photorhabdus luminescens TT01 exhibiting one or more mutation(s) may be used to validate the function of a wild-type gene of Photorhabdus luminescens .

[0224] The invention also relates to the use of a nucleotide sequence according to the invention, of a polypeptide according to the invention, of an antibody according to the invention, and/or of a cell according to the invention, for selecting an organic or inorganic compound capable of modulating, regulating, inducing or inhibiting gene expression in a plant or animal cell or in a microorganism other than P. luminescens, the resistance or sensitivity of which to at least one toxin or antibiotic produced by P. luminescens it is, for example, desired to modify.

[0225] The invention also comprises a method for selecting compounds capable of binding to a polypeptide or one of its fragments according to the invention, capable of binding to a nucleotide sequence according to the invention, or capable of recognizing an antibody according to the invention, and/or capable of modulating, regulating, inducing or inhibiting gene expression, and/or of modifying growth or cell replication of eukaryotic or prokaryotic cells, or capable of inducing, inhibiting or increasing, in an animal or plant organism, resistance or sensitivity to at least one toxin or antibiotic produced by P. luminescens, said method comprising the following steps:
[0226] a) bringing said compound into contact with said polypeptide or said nucleotide sequence and/or with a transformed cell according to the invention;
[0227] b) determining the ability of said compound to bind to said polypeptide or said nucleotide sequence, or to modulate, regulate, induce or inhibit gene expression, or to modulate growth or cell replication, or to induce, inhibit or increase, in an animal or plant organism, resistance or sensitivity to at least one toxin or antibiotic produced by P. luminescens.

[0228] The transformed cells according to the invention may advantageously be used as a model and may be used in methods for studying, identifying and/or selecting compounds liable to be responsible for resistance or sensitivity to at least one toxin or antibiotic produced by P. luminescens. The compounds which may be selected can be organic compounds such as polypeptides or carbohydrates or any other organic or inorganic compounds which are already known, or new organic compounds developed using molecular modeling techniques and obtained by chemical or biochemical synthesis, these techniques being known to those skilled in the art.

[0229] The invention relates to the compounds which can be selected using a method of selection according to the invention.

[0230] The invention also relates to a composition, in particular pesticidal or pharmaceutical composition, comprising a compound chosen from the following compounds:
[0231] a) a nucleotide sequence according to the invention;
[0232] b) a polypeptide according to the invention;
[0233] c) a vector according to the invention;
[0234] d) an antibody according to the invention; and
[0235] e) a compound which can be selected using a method of selection according to the invention,
   optionally in combination with a pharmaceutically acceptable vehicle.

[0236] The invention also relates to a pharmaceutical composition according to the invention, for preventing or treating an infection with a microorganism, such as a bacterium or a fungus, sensitive to at least one toxin or antibiotic produced by P. luminescens.

[0237] The invention also relates to a pesticidal composition, in particular against insects, bacteria and/or fungi, according to the invention, for preventing or treating plants infested with animals, such as insects, or with a microorganism, such as a bacterium or a fungus, sensitive to at least one toxin or antibiotic produced by P. luminescens.

[0238] The invention also comprises the use of a transformed cell according to the invention, for preparing a toxin or an antibiotic produced by P. luminescens.

[0239] The expression “pharmaceutically acceptable vehicle” is intended to denote a compound or a combination of compounds making up a pharmaceutical composition causing no side effects and which makes it possible, for example, to facilitate administration of the active compound, to increase its lifetime and/or its effectiveness in the organism, to increase its solubility in solution or else to improve its conservation. These pharmaceutically acceptable vehicles are well known and will be adjusted by those skilled in the art as a function of the nature and of the method of administration of the active compound chosen.

[0240] Preferably, these pharmaceutical compounds will be administered systemically, in particular intravenously, intramuscularly, intradermally or subcutaneously, or orally.

[0241] Their methods of administration, dosages and pharmaceutical forms which are optimal can be determined according to the criteria generally taken into account in establishing a treatment suitable for a patient, such as, for example, the age or the body weight of the patient, the seriousness of his or her general condition, the tolerance to the treatment and the side effects observed.

[0242] Finally, the invention comprises the use of a composition according to the invention, for preparing a medicinal product intended for the prevention or treatment of an infection with a microorganism, such as a bacterium or a fungus, sensitive to at least one toxin or antibiotic produced by P. luminescens.

[0243] Moreover, a subject of the present invention is also a genomic DNA library of a bacterium of the genus Photorhabdus, preferably Photorhabdus luminescens , preferably the strain TT01.

[0244] The genomic DNA libraries described in the present invention, in particular the BAC library deposited with the CNCM [French National Collection of Cultures and Microorganisms] on May 12, 2000, under No. I-2478 and which covers the Photorhabdus luminescens TT01 genome.

[0245] The invention also relates to a method for identifying at least one nucleotide sequence of P. luminescens not present in the genome of another species of bacterium, in particular a pathogenic bacterium, and/or for identifying at least one nucleotide sequence of a genome of a bacterium, in particular a pathogenic bacterium, of a species other than P. luminescens and not present in the P. luminescens genome, characterized in that it comprises the following steps:
[0246] a) the nucleotide sequences of P. luminescens according to the invention, or contained in a genomic library according to the invention, are aligned with the genomic sequence of the other bacterial species, or one of its fragments; and
[0247] b) the data obtained with this alignment are processed in order to isolate and identify said sequence(s) only present in one or the other genome.

[0248] Such a method, also called “subtractive genomic method”, can be used here to identify a sequence responsible for the pathogenicity of a bacterium, such as a gram-negative bacterium, for which the P. luminescens bacterium, which is not pathogenic, can serve as a model for comparison.

[0249] The present invention thus relates to the methods for isolating a polynucleotide of interest present in a strain of Photorhabdus and absent from another strain or species, which use at least one DNA library based, for example, on a plasmid pcDNA2.1 containing the Photorhabdus genome. The method according to the invention for isolating a polynucleotide of interest can comprise the following steps:
[0250] a) isolating at least one polynucleotide contained in a clone of the library of DNA of Photorhabdus origin;
[0251] b) isolating:
   [0252] at least one genomic polynucleotide or cDNA of a bacterium, said bacterium belonging to a strain or species different from the Photorhabdus strain used to construct the DNA library of step a) or, alternatively,
   [0253] at least one polynucleotide contained in a clone of a DNA library prepared from the genome of a bacterium belonging to a strain or species different from the Photorhabdus strain used to construct the DNA library of step a), and hybridizing the polynucleotide of step a) to the polynucleotide of step b);
[0254] c) selecting the polynucleotides of step a) which have not formed a hybridization complex with the polynucleotides of step b);
[0255] d) characterizing the selected polynucleotide.

[0256] The polynucleotide of step a) can be prepared by digesting at least one recombinant clone with a suitable restriction enzyme and, optionally, amplifying the polynucleotide insert which results therefrom.

[0257] Thus, the method of the invention allows those skilled in the art to carry out comparative genomic studies between a bacterium of the genus Photorhabdus and between, for example, a pathogenic strain or species.

[0258] In particular, it is possible to study and determine the regions of polymorphism between said strains.

[0259] The present invention also relates to the use of the nucleic acid sequences or of the polypeptides according to the invention:
[0260] for preparing biopesticides, in particular entomotoxins, antibiotics, antifungal agents or cytotoxins,
[0261] for secreting proteins,
[0262] as virulence factors,
[0263] for control via quorum-sensing, for identifying targets for human diseases for which Photorhabdus luminescens is a model (in particular the plague or whooping cough), and
[0264] for identifying targets against pathogenic Gram-negative bacteria using the subtractive genomic method (such as, for example, by comparison with E. coli or other pathogenic gram-negative bacteria).

[0265] The present invention also relates to the use of the polypeptides according to the present invention, for screening compounds capable of modulating the activity of these polypeptides, in particular the polypeptides with enzymatic activity.

[0266] Other characteristics and advantages of the invention appear in the following examples:

### EXAMPLES

### Example 1

### Materials and Methods

[0267] The strategy for sequencing the genome of Photorhabdus luminescens strain TT01 is based on random (shotgun) sequencing. The first step of this study consisted in cloning the genomic DNA of the Photorhabdus luminescens bacterium into various vectors (plasmids and BACs). Photorhabdus luminescens genomic DNA libraries used.

[0268] Three genomic DNA libraries were prepared:
[0269] I)—A genomic DNA library in a high copy number bacterial vector (pcDNA2.1, Invitrogen). Average insert size 1.5 kb.
[0270] II)—A genomic DNA library in a low copy number bacterial vector (pSYX34). Average insert size 10 kb.
[0271] III)—A genomic DNA library in a BAC vector (pBeloBAC11, California Institute of Technology). Average insert size 50 to 100 kb.

[0272] Two batches of DNA of the TT01 strain of the Photorhabdus luminescens bacterium were extracted on Oct. 30, 1998 and Apr. 14, 1999.

I) Establishing a Genomic DNA Library in the Bacterial Vector pcDNA2.1 (Invitrogen)

[0273] A) Preparation of the Vector: pcDNA2.1

[0274] We prepared the plasmid pcDNA2.1 by carrying out two midipreps (QIAGEN KIT) in parallel according to the conditions recommended by the manufacturer. The vector pcDNA2.1 was digested with the BstX1 restriction enzyme.

[0275] B) Preparation of the Chromosomal DNA of Photorhabdus luminescens Strain TT01 and Ligation into the Vector pcDNA2.1

[0276] 1) Dissolving of the DNA

[0277] A dry pellet of genomic DNA of the strain TT01, prepared on Oct. 30, 1998, was taken up in 200 μl of 10:1 TE, and then dissolved for 30 minutes at 65° C. Its concentration was estimated at 0.15 μg/μl.

[0278] 2) Nebulization of the DNA

[0279] 50 μl of genomic DNA strain TT01 in an amount of H₂O sufficient for 2 ml were nebulized for 45 sec at a pressure of 1 bar of nitrogen, and centrifuged for 2 min at 600 rpm in order to recover the entire volume.

[0280] 3) Precipitation of the DNA

[0281] This DNA was then precipitated with sodium acetate (2 ml of DNA+0.2 ml of 3M Na acetate, pH 5.2,+5 ml of absolute ethanol; 2 h at −20° C.), centrifuged for 30 min at 14 000 rpm and at 4° C., and then redissolved in 100 μl of water.

[0282] 4) Analysis of the DNA

[0283] 4 μl were loaded onto a 1% agarose TBE gel.

[0284] DNA fragments of the expected size of 500 bp to 3 kb were visualized.

[0285] 5) Repair of the DNA

[0286] In order to blunt end the DNA fragments, repair was carried out using T4 DNA polymerase.

[0287] The following are mixed in 2 separate tubes:
[0288] 48 μl of DNA from step 3),
[0289] 100 μl of H₂O,
[0290] 20 μl of 5× ligation buffer,
[0291] 2 μl of dNTP mix (10 mM),
[0292] 5 μl of T4 DNA polymerase (Boehringer).

[0293] Incubation is carried out for 25 min at ambient temperature and the reaction is then stopped by heating for 15 min at 75° C.

[0294] 6) Precipitation of the DNA

[0295] This DNA was then precipitated overnight at −20° C. with sodium acetate (1/10 volume of Na acetate and 2.5 volume of absolute ethanol) and centrifuged, and the DNA pellet obtained was then air-dried and redissolved in 30 μl of water.

[0296] 7) Ligation of the DNA

[0297] This DNA was ligated overnight at 16° C. with the Bstx A+Bstx B linkers (Invitrogen) in the presence of 2 μl of ligase.

[0298] 8) Preparation of the Inserts

[0299] After migration of the DNA ligated to the linkers in a 1% agarose TAE gel, at 70 volts, the region of interest (between 1 and 3 Kb) was cut into four fragments.

[0300] 9) Purification of the Inserts

[0301] The agarose fragments containing the regions of interest were purified using Geneclean (BIO101) according to the conditions recommended by the manufacturer.

[0302] An aliquot was loaded onto an agarose minigel in order to validate the quality of the purification.

[0303] 10) Ligation of the Inserts into the Vector pcDNA2.1 (Invitrogen)
[0304] 4 μl of DNA (insert after the Geneclean purification step, step 9),
[0305] 2 μl of plasmid pcDNA2.1 (after the BstX1 digestion step and then Geneclean purification),
[0306] 2 μl of ligation buffer (10×),
[0307] add 2 μl of ligase,
[0308] 10 μl H₂O (total volume: 20 μl).

[0309] The mixture is incubated overnight at 16° C.

[0310] 11) Transformation of Ultracompetent XL2 Blue Cells (Stratagene)

[0311] The genomic DNA library obtained in step 10 was integrated into ultracompetent XL2 Blue cells (Stratagene) according to the conditions recommended by the manufacturer.

[0312] Analysis of the inserts of 24 clones by digestion with the PvuII restriction enzyme and by sequencing of the ends was carried out and gave satisfactory results.

II) Establishing a Genomic DNA Library in the Bacterial Vector pSYX34

[0313] The PARTIAL FILL-IN technique, developed in the laboratory, allowed us to construct a library of genomic DNA of the TT01 strain of the bacterium Photorhabdus luminescens , cloned into the plasmid pSYX34 (average insert size 10 Kb).

[0314] Note: in this case, digestion of the vector pSYX34 with the Sal I restriction enzyme frees the following ends:

5′TCGAC-G-5′

[0315] The PARTIAL FILL-IN was carried out in the presence of dCTP and dTTP deoxynucleotides.

5′TCGAC-CTG-5′

[0316] A) Preparation of the Vector: pSYX34

[0317] 1) Production of the Vector

[0318] Plasmid pSYX34 was prepared by carrying out two midipreps, QIAGEN KIT, in parallel according to the conditions recommended by the manufacturer.

[0319] 2) Digestion of the Plasmid pSYX34 with the Sal I Restriction Enzyme

[0320] The final volume will be 100 μl:
[0321] 20 μl pSYX34,
[0322] 10 μl of buffer H,
[0323] 66 μl of H₂O,
[0324] 4 μl Sal I.

[0325] The mixture is incubated for 2 h at 37° C.

[0326] An aliquot and also a molecular weight marker were loaded onto an agarose minigel in order to validate the quality of the purification.

[0327] 3) Chloroform Extraction

[0328] Chloroform extraction makes it possible to stop the enzyme digestion and to remove any traces of protein.

[0329] After digestion, 95 μl are recovered,

[0330] 105 μl of 10 mM TE are added,

[0331] 200 μl of chloroform are added.

[0332] The mixture is vortexed and centrifuged for 1 min at 1 000 rpm.

[0333] The aqueous phase (upper phase) is recovered.

[0334] 4) Precipitation with Sodium Acetate
[0335] 1/10 volume of sodium acetate (3M, pH: 5.2), i.e. 20 μl, are added,
[0336] followed by 2.5 volumes of clean absolute ethanol, i.e. 500 μl (bottle kept at −20° C.).
[0337] The mixture is left at −20° C. for at least 1 hour (it is possible to leave it at −20° C. overnight).
[0338] The mixture is centrifuged at 4° C. (cold room) for 30 min at 14 000 rpm.
[0339] The supernatant is removed using the vacuum pump.
[0340] 400 μl of 70% ethanol are added and the mixture is centrifuged at 4° C. for 5 min at 14 000 rpm.
[0341] The supernatant is removed using the vacuum pump and the pellet is left to dry for approximately one hour on the bench.
[0342] The pellet is resuspended in 20 μl of 10 mM TE (1/10).

[0343] 5) Partial Fill-in

[0344] Final volume of the reaction: 50 μl; 20 μl of pSYX34 digested with Sal I
[0345] 5 μl of synthesis buffer,
[0346] 2.5 μl of 1 mM nucleotide (C-T) mix,
[0347] 20.5 μl of water,
[0348] 2 μl of Klenow (2 U/μl).

[0349] The mixture is left for 30 min at ambient temperature.

[0350] Verification is carried out on a 1% agarose minigel, followed by freezing at −20° C.

[0351] Mixture of C-T Nucleotides:

[0352] Mix:
[0353] 2 μl of T nucleotides (100 mM),
[0354] 2 μl of C nucleotides (100 mM),
[0355] 16 μl of 10 mM TRIS, pH=7.5.

[0356] The nucleotides are thus diluted to 1/10, for a concentration of 10 mM.

[0357] A second dilution to 1/10 in 10 mM TRIS buffer will be carried out so as to have a concentration of 1 mM.

[0358] In addition, during the reaction, the nucleotides are diluted to 1/20 (2.5 μl in 50 μl), thus obtaining a final concentration of nucleotides of 50 μM.

[0359] 6) Purification of the Vector pSYX34: Preparative Gel

[0360] Prepare a 1% agarose TAE gel, large wells will be provided for the samples.

[0361] Take 30 μl of pGB2 after the partial fill-in (20 μl will therefore remain in the freezer), add 6 μl of loading solution. In parallel, load the molecular weight marker in the following proportions:
[0362] 5 μl H₂O,
[0363] 5 μl of the 1 Kb DNA marker,
[0364] 2 μl of the loading solution.

[0365] Allow to migrate at 70 volts.

[0366] Cut the gel on the marker side using a scalpel and locate, by taking a photo and using a ruler, the region of interest; in our case, the band corresponding to 4 Kb will be taken. Each sample will be cut in half. The weight of each sample will indicate its approximate volume.

[0367] There will therefore be four samples to purify by the Geneclean II technique.

[0368] 7) Purification of the Vector pSYX34
[0369] Take up in 3 volumes of sodium iodide solution (1 ml for a sample of 0.2 g), place at 49° C., shaking every 2 minutes, until the agarose has completely dissolved.
[0370] Add 8 μl of microbeads: GLASSMILK R, leave at ambient temperature for 5-10 min, the DNA attaches to the microbeads.
[0371] Centrifuge for 2 min at 14 000 rpm, remove the supernatant by suction.
[0372] Wash 3 times with the New Wash solution (600 μl/eppendorf, vortex, centrifuge for a few seconds at 10 000 rpm); this solution was prepared and is kept at −20° C.
[0373] Resuspend the pellet in 10 μl of H₂O, vortex, leave for 5 min at 49° C. This allows the DNA to detach from the microbeads.
[0374] Centrifuge for 2 min at 14 000 rpm.
[0375] Recover the supernatants in new eppendorfs (No. 1 and No. 2, etc)
[0376] Add 10 μl of H₂O again to the pellets, so as to be sure to recover everything, vortex, leave for 2 min at 49° C.
[0377] Centrifuge for 2 min at 14 000 rpm.
[0378] Recover the supernatants in the preceding eppendorfs (No. 1 and No. 2, etc).
[0379] There are approximately 20 μl of supernatant, centrifuge for 2 min at 14 000 rpm.
[0380] Transfer the supernatants into new eppendorfs, so as to be sure that there are no longer any microbeads.
[0381] Load 1 μl of each preparation (+5 μl of H₂O+2 μL of loading solution) onto a 1% agarose minigel, allow to migrate at 80 volts for 2 hours.

[0382] The most concentrated samples will be kept, they will then be frozen at −20° C.

[0383] B) Preparation of the Chromosomal DNA of Photorhabdus luminescens Strain TT01

[0384] 1) Dissolving of the DNA

[0385] A dry pellet of genomic DNA of the strain TT01 was taken up in 200 μl of 10:1 TE and then dissolved for 30 min at 65° C. Its concentration was estimated at 0.15 μg/μl.

[0386] 2) Partial Digestion of the Genomic DNA with the Sau3A Restriction Enzyme

[0387] 15 μl of DNA were digested with 2, 1, 0.5, 0.25, 0.125, 0.0625 or 0.03125 units of Sau3A restriction enzyme for 1 h at 37° C.

[0388] 3) Chloroform Extraction

[0389] Chloroform extraction makes it possible to stop the enzyme digestion and to remove any traces of protein.

[0390] After digestion, 100 μl of chromosomal DNA are recovered.

[0391] 100 μl of 10 mM TE are added,

[0392] 200 μl of chloroform are added.

[0393] The mixture is vortexed and centrifuged for 1 min at 1 000 rpm.

[0394] The aqueous phase, the upper phase, comprising the chromosomal DNA is recovered.

[0395] 4) Precipitation with Sodium Acetate

[0396] 1/10 volume of sodium acetate (3M, pH: 5.2), i.e. 20 μl, are added.

[0397] 2.5 volumes of clean absolute ethanol, i.e. 500 μl, (bottle kept at −20° C.) are then added.

[0398] The mixture is left at −20° C. for at least 1 hour (it is possible to leave it at −20° C. overnight).

[0399] The mixture is centrifuged at 4° C. (cold room) for 30 min at 14 000 rpm.

[0400] The supernatant is removed using the vacuum pump.

[0401] 400 μl of 70% ethanol are added, the mixture is centrifuged at 4° C. for 5 min at 14 000 rpm.

[0402] The supernatant is removed using the vacuum pump and the pellet is left to dry for approximately one hour on the bench.

[0403] The pellet is resuspended in 20 μl of H₂O.

[0404] 5) Verification of the Partial Digestions, after Precipitation with Sodium Acetate.

[0405] A 1% agarose TBE gel is prepared. 1/10 of the total volume of the precipitations, i.e. 2 μl of DNA+8 μl of H₂O+2 μl of loading solution, is loaded.

[0406] In parallel, a molecular weight marker is loaded: 1 μl+9 μl of H₂O+2 μl of loading solution.

[0407] 6) Partial Fill-in

[0408] Final volume of the reaction: approximately 50 μl
[0409] 36 μl of partially digested DNA (DNA digested with 0.25, 0.125, 0.0625 or 0.03125 units of Sau3A restriction enzyme)
[0410] 5 μl of synthesis buffer
[0411] 10 μl of 1 mM nucleotide (A-G) mix=>final concentration: 200 μM
[0412] 2 μl of Klenow (2 U/μl).

[0413] The mixture is left at ambient temperature for 30 min.

[0414] Mixture of A-G Nucleotides

[0415] Mix:
[0416] 2 μl of A nucleotides (100 mM)
[0417] 2 μl of G nucleotides (100 mM)
[0418] 16 μl of 10 mM TRIS, pH=7.5.

[0419] The nucleotides are thus diluted to 1/10, giving a concentration of 10 mM.

[0420] A second dilution to 1/10 in H₂O will be carried out, a concentration of 1 mM is therefore obtained.

[0421] 7) Chloroform Extraction

[0422] Chloroform extraction makes it possible to stop the enzyme digestion and to remove any traces of protein.

[0423] After digestion, 53 μl of chromosomal DNA are recovered.

[0424] 47 μl of 10 mM TE are added.

[0425] 100 μl of chloroform are added.

[0426] The mixture is vortexed and centrifuged for 1 min at 1 000 rpm.

[0427] The aqueous phase, the upper phase, comprising the chromosomal DNA is recovered.

[0428] 8) Precipitation with Sodium Acetate

[0429] 1/10 volume of sodium acetate (3M, pH: 5.2), i.e. 10 μl, are added.

[0430] 2.5 volumes of clean absolute ethanol, i.e. 250 μl, (bottle kept at −20° C.) are then added.

[0431] The mixture is left at −20° C. for at least 1 hour (it is possible to leave it at −20° C. overnight).

[0432] The mixture is centrifuged at 4° C. (cold room) for 30 min at 14 000 rpm.

[0433] The supernatant is removed using the vacuum pump.

[0434] 400 μl of 70% ethanol are added, the mixture is centrifuged at 4° C. for 5 min at 14 000 rpm.

[0435] The supernatant is removed using the vacuum pump and the pellet is left to dry for approximately one hour on the bench.

[0436] The pellet is resuspended in 20 μl of H₂O.

[0437] 9) Purification of the Chromosomal DNA: Preparative Gel

[0438] Prepare a 1% agarose TAE gel, large wells will be provided for the samples.

[0439] Take the entire DNA, i.e. 20 μl, add 4 μl of loading solution. In parallel, load the molecular weight marker in the following proportions:
[0440] 5 μl H₂O
[0441] 5 μl of the 1 Kb DNA marker
[0442] 2 μl of the loading solution.

[0443] Allow to migrate at 70 volts.

[0444] Cut the gel on the marker side using a scalpel and locate, by taking a photo and using a ruler, the region of interest. Since the DNA fragments are long, SPIN X columns from COSTAR will be used to purify the DNA, this will avoid cleaving the chromosomal DNA.

[0445] 10) Purification: SPIN X Column

[0446] After having recovered the various pieces of agarose, in SPIN X columns, add 200 μl of 10 mM TE and then grind using a spatula.

[0447] This may be kept at 4° C. Then, centrifuge for 20 min at 5 000 rpm. The agarose will be retained on the filters, whereas the chromosomal DNA will be found at the bottom of the tube.

[0448] 11) Chloroform Extraction

[0449] Chloroform extraction makes it possible to remove any traces of protein.

[0450] 800 μl of chromosomal DNA are recovered.

[0451] 800 μl of chloroform are added.

[0452] The mixture is vortexed and centrifuged for 1 min at 1 000 rpm.

[0453] The aqueous phase, the upper phase, comprising the chromosomal DNA is recovered.

[0454] 12) Precipitation with Sodium Acetate

[0455] 1/10 volume of sodium acetate (3M, ph: 5.2), i.e. 80 μl, are added.

[0456] 800 μl of isopropanol are then added.

[0457] The mixture is left at −20° C. for at least 1 hour (it is possible to leave it at −20° C. overnight).

[0458] The mixture is centrifuged at 4° C. (cold room) for 30 min at 14 000 rpm.

[0459] The supernatant is removed using the vacuum pump.

[0460] 400 μl of 70% ethanol are added and the mixture is centrifuged at 4° C. for 5 min at 14 000 rpm.

[0461] The supernatant is removed using the vacuum pump, and the pellet is allowed to dry for approximately half an hour on the bench and 2 min under vacuum.

[0462] The pellet is resuspended in 20 μl of TE (0.1×, i.e. 1 mM).

[0463] The suspension is incubated for 10 min at 65° C.

[0464] The suspension is incubated for approximately 4 hours at 4° C., so that the DNA is well resuspended.

[0465] Verification is carried out on a 1% agarose minigel with a molecular weight marker placed in parallel.

[0466] C) Ligation of the chromosomal DNA of Photorhabdus luminescens Strain TT01 into the Vector pSYX34

[0467] Take 6 μl of chromosomal DNA.

[0468] Add 2 μl of pSYX34.

[0469] Add 2 μl of ligation buffer (LB).

[0470] Add 2 μl of ligase.

[0471] Then add 8 μl of H₂O (total volume: 20 μl)

[0472] In parallel, prepare a ligation control by replacing the chromosomal DNA with 0.1× TE (1 mM).

[0473] Vortex, leave overnight at 16° C.

Transformation of Ultracompetent XL10-Gold Kanr Cells (Stratagene)

[0474] The genomic DNA library obtained in the preceding step was integrated into ultracompetent XL10 Gold Kanr cells (Stratagene) according to the conditions recommended by the manufacturer.

[0475] Analysis of the inserts of 24 clones by digesting with the SalI restriction enzyme and by sequencing of the ends was carried out and gave satisfactory results.

III) Establishing a Genomic DNA Library in the Bacterial Vector pBeloBAC11 (California Institute of Technology)

[0476] Construction of the BAC Library

[0477] Partial digestion of the DNA in pieces of agarose:
[0478] the pieces of agarose are washed three times for 15 minutes at ambient temperature in a solution of TE (1×) with moderate agitation;
[0479] the pieces of agarose are equilibrated twice in 300 μl of a Hind III digestion buffer (1×) (Boehringer or Biolabs) for 30 minutes at ambient temperature;
[0480] the digestion buffer is removed and an ice-cold Hind III digestion buffer (1 ml per piece of agarose) containing 20 U of Hind III (Boehringer or Biolabs) is added;
[0481] incubation is carried out for two hours in ice;
[0482] the pieces of agarose are transferred to a water bath at 37° C. and incubation is carried out for 10 minutes to 30 minutes (depending on the DNA contained in the pieces of agarose); and
[0483] the digestion is stopped by adding 100 μl of a 250 mM EDTA solution (pH 8).

[0484] Size Selection:

[0485] Separation of the Partially Digested DNA by PFGE Using the CHEF DRIII Apparatus (Bio-Rad):
[0486] gel of 1% LMP agarose in a tris-acetate-EDTA buffer (1×) at 13° C.,
[0487] reverse the current every 3 to 15 seconds at 6 V/cm for 16 hours,
[0488] load at least two pieces of agarose and the marker,
[0489] stain the marker and one lane or a part of the lane to verify the partial digestion,
[0490] excise the bands (unstained part) of various sizes (i.e. from 50 to 100 kb and from 150 to 250 kb),
[0491] the agarose bands can be stored at 4° C. in a TE solution.

[0492] Preparation of the Vector:
[0493] isolation of pBeloBACII by the cesium chloride method;
[0494] digestion with Hind III;
[0495] dephosphorylation with CIP (optionally with HK phosphatase).

[0496] Ligation and Transformation:
[0497] the agarose banks containing the DNA are melted at 60° C. for 10 minutes;
[0498] the molten solution of agarose/DNA is equilibrated for 15 minutes at 45° C.;
[0499] gelase (Epicentre Technologies) is added in a proportion of 1 U per 100 μl of gel band (do not add digestion buffer, which causes certain problems at the time of ligation);
[0500] the digestion is carried out for 1 hour at 45° C.;
[0501] the ligation is carried out in 50 μl of a solution containing pBeloBACII (2 μl), T4 ligase (1 μl at 1:10), a 10× T4 buffer (5 μl ), and the DNA/agarose solution (42 μl), incubation is for 20 hours at 16° C.;
[0502] the ligation medium is heated for 15 minutes at 65° C.;
[0503] the ligation medium is dialyzed against a Tris-EDTA buffer, using Millipore membranes of pore size VS 0.025 mM;
[0504] 1 or 2 μl of the ligation solution are introduced by electroporation into E. coli DH10B cells (Gibco BRL) using electroporation cuvettes with a width of 2 mm, with the following settings: 2.5 kV, 25 μF and 200Ω;
[0505] after electroporation, the cells are resuspended in 600 μl of SOC or NYZ medium, and then incubation is carried out for 45 minutes at 37° C. with agitation;
[0506] 10 and 100 μl of each cell suspension are plated out in an LB agar medium containing chloramphenicol (12.5 μg/ml), X-Gal (5-bromo-4-chloro-3-indolyl-α-D-glucuronic acid; 50 μg/ml) and IPTG (isopropyl-α-D-thiogalactopyranoside; 25 μg/ml); and
[0507] the dishes thus obtained are incubated overnight.

[0508] Extraction of the Plasmid DNA and Sequencing of the Inserts

[0509] The plasmid DNA was extracted by the alkaline lysis technique in 24-well plates.

[0510] The inserts of the clones were sequenced using the PE Big Dye kit according to the conditions recommended by the manufacturer, using the oligonucleotides specific for each vector.

[0511] The reactions are then introduced into the thermocycler in order to undergo 35 cycles composed of the following three steps:
[0512] denaturation for 10 seconds at 96° C.,
[0513] hybridization for 10 seconds at 50° C.,
[0514] elongation for 4 minutes at 56° C.

[0515] A precipitation with 76% ethanol is then carried out for 20 minutes at ambient temperature.

[0516] The plates are then centrifuged for 35 minutes at 2 200 g, then drained on absorbent paper, and then centrifuged turned upside down on absorbent paper for 1 minute at 500 g in order to leave no trace of ethanol.

[0517] The DNA pellets are then:
[0518] either taken up in a solution of formamide-EDTA-dextran blue, and then denatured for 2 minutes at 96° C. The plates are then immediately placed in ice, an aliquot then being loaded onto an acrylamide gel of a PE-377 automatic sequencer,
[0519] or taken up in a 0.3 mM EDTA solution, an aliquot then being automatically loaded into a PE-3700 automatic sequencer.

[0520] Assembly of the Sequences Obtained

[0521] The genomic DNA sequences were assembled in a contig using the PHRED-PHRAP software and visualized using the CONSED software.

[0522] Analysis and Annotation

[0523] The contigs were first of all analyzed and annotated automatically using the GMPTB software.

### Example 2

### The Genes of Interest

[0524] The various characteristics associated with the way of life of Photorhabdus luminescens and reported in the literature (Forst et al., 1997; Hu et al., 1998, etc.) led to the presence of genes involved in the biosynthesis of antibiotics and of toxins being sought in the genome of this bacterium.

The Operons for Biosynthesis of Antibiotics

[0525] The search for peptide synthetases was undertaken in silico. To do this, we initially used the various motifs conventionally described in the literature (Stachelhaus & Marahiel, 1995, FEMS Microbiology Letters 125:3-14) as a probe in order to locate, by sequence homology, in the Photorhabdus luminescens genome, genes which may be involved in the biosynthesis of antibiotics.

[0526] Adenylation Modules

1 - LKAGGAYYVPID
2 - YSGTTGxPKGV
3 - GELCIGGXGxARGYL
4 - YxTGD
5 - VKIRGxRIELGEIE

[0527] Thioester Formation Module

6 - DNFYxLGGHSL

[0528] N-Methylation Module

VLE/DxGxGxG

[0529] Peptide Elongation Module

His-HHILxDGW

[0530] Peptide Racemization Module (Optional)

His-HHILxDGW
A - AYxTExNDILLTAxG
B - EGHGRExIIE
C - RTVGWFTSMYPxxLD
D - FNYLGQFD

[0531] Among these various modules, some enabled us to identify, by homology search using the BLASTP—basic local alignment search tool program—(Altschul S F et al., 1990, J. Mol. Biol., 215:403-10), genes encoding proteins containing some of these motifs.

[0532] The genes thus identified, probably encoding proteins involved in the biosynthesis of antibiotics, were cataloged and appear in particular in table I.

[0533] Emphasis was placed particularly on the genes homologous to the syr E gene of Pseudomonas syringae or to the nosD gene.

### REFERENCES

[0534] Eric Guenzi, Giuliano Galli, Ingeborg Grgurina, Dennis C. Gross, and Guido Grandi, 1998. Characterization of the Syringomycin Synthetase Gene Cluster. A link between prokaryotic and eukaryotic peptide synthetases. J. Biol. Chem., 273:32857-32863.
[0535] Bondi M, Messi P, Sabia C, Baccarani Contri M, Manicardi G., 1999. Antimicrobial properties and morphological characteristics of two Photorhabdus luminescens strains. New Microbiol., 22:117-27.
   The Operons for Biosynthesis of Toxins

[0536] As for the genes for biosynthesis of antibiotics, we sought, by sequence homology, in the Photorhabdus luminescens genome, genes potentially encoding toxic proteins. We identified many genes encoding proteins having these criteria.

[0537] Entomotoxins (Tc loci).

[0538] Homologs of the Tox A gene of Clostridium difficile.

[0539] Hemolysins.

[0540] Genes potentially encoding proteins homologous to the RTX toxins of Vibrio cholerae.

[0541] Genes potentially encoding proteins homologous to the tphA and icmF genes of Legionella pneumophila (Purcell M, Shuman H A, 1998. The Legionella pneumophila icmGCDJBF genes are required for killing of human macrophages. Infect Immun., 66:2245-55).

[0542] See annotation of these genes in table I below.

### REFERENCES

[0543] Ffrench-Constant R, Bowen D., 1999. Photorhabdus toxins: novel biological insecticides. Curr Opin Microbiol., 2:284-8. Review.
[0544] Blackburn M, Golubeva E, Bowen D, Ffrench-Constant R H, 1998. A novel insecticidal toxin from Photorhabdus luminescens, toxins complex a (Tca), and its histopathological effects on the midgut of manduca sexta. Appl Environ Microbiol., 64:3036-41.
[0545] Bowen D J, Ensign J C, 1998. Purification and characterization of a high-molecular-weight insecticidal protein complex produced by the entomopathogenic bacterium Photorhabdus luminescens . Appl Environ Microbiol., 64:3029-35.
[0546] Bowen D, Rocheleau T A, Blackburn M, Andreev 0, Golubeva E, Bhartia R, Ffrench-Constant R H, 1998. Insecticidal toxins from the bacterium Photorhabdus luminescens. Science., 280:2129-32.
[0547] Guo L, Fatig R O 3rd, Orr G L, Schafer B W, Strickland J A, Sukhapinda K, Woodsworth A T, Petell J K, 1999. Photorhabdus luminescens W-14 insecticidal activity consists of at least two similar but distinct proteins. Purification and characterization of toxin A and toxin B. J. Biol Chem., 274:9836-42.

### GENERAL REFERENCES

[0548] 1. Altschul, S. F., T. L. Madden, A. A. Schaffer, J. Zhang, Z. Zhang, W. Miller, and D. J. Lipman. 1997. Gapped BLAST and PSI-BLAST: a new generation of protein database search programs. [Review] [90 refs]. Nucleic Acids Research. 25:3389-402.
[0549] 2. Birnboim, H. C. 1983. A rapid alkaline extraction method for the isolation of plasmid DNA. Methods Enzymol. 100:243-255.
[0550] 3. Braun, L. F. Nato, B. Payrastre, J. C. Mazie, and P. Cossart. 1999. The 213-amino-acid leucine-rich repeat region of the Photorhabdus luminescens InIB protein is sufficient for entry into mammalian cells, stimulation of P1 3-kinase and membrane ruffling. Mol. Microbiol. 34:10-23.
[0551] 4. Buchrieser, C., C. Rusniok, L. Frangeul, E. Couvé, A. Billault, F. Kunst, E. Carniel, and P. Glaser. 1999. The 102 kb locus of Yersinia pestis: sequence analysis and comparison of selected regions among different Yersinia pestis and Yersinia pseudotuberculosis strains. Infect. Immun. 67:4851-4861.
[0552] 5. Ewing, B., and P. Green. 1998. Base-calling of automated sequencer traces using phred. II. Error probabilities. Genome Res. 8:186-194.
[0553] 6. Fitch, W. S. 1970. Distinguishing homologous from analogous proteins. Syst. Zool. 19:99-113.
[0554] 7. Frangeul, L., K. E. Nelson, C. Buchrieser, A. Danchin, P. Glaser, and K. F. 1999. Cloning and assembly strategies in microbial genome projects. Microbiology. 145:2625-2634.
[0555] 8. Gordon, D., C. Abajian, and P. Green. 1998. Consed: a graphical tool for sequence finishing. Genome Res. 8:195-202.
[0556] 9. Jacquet, C., J. Bille, and J. Rocourt. 1992. Typing of Photorhabdus luminescens by restriction polymorphism of the ribonucleic acid gene region. Zentralbl Bakteriol. 276:356-365.
[0557] 10. Li, P., K. C. Kupfer, C. J. Davies, D. Burbee, G. A. Evans, and H. R. Garner. 1997. PRIMO: A primer design program that applies base quality statistics for automated large-scale DNA sequencing. Genomics. 40:476-485.
[0558] 11. Lukashin, A. V., and M. Borodovsky. 1998. GeneMark.hmm: new solutions for gene finding. Nucleic Acids Res. 15:1107-1115.
   Scientific Description of the Photorhabdus luminescens Strain TT01 BAC Library Deposited with the CNCM [French National Collection of Cultures and Microorganisms] on May 12, 2000, Under the Number I-2478

[0559] Collection of Escherichia coli DH 10B™ clones (Calvin et al., J. Bacteriol. 170, 2796, 1988) containing genomic DNA fragments from the Photorhabdus luminescens strain TT01 bacterium, cloned into the vector pBelo BACII (Kim et al., Genomics, 34, 213, 1996) at the Hind III site. The average insert size is 60 kb.

Databanks

[0560] Local revisions of main public banks were used. The protein bank used consists of the nonredundant fusion of these banks, such as the Genpept bank (automatic translation of GenBank and NCBI).

[0561] Use was made of the BLAST software package (public domain, Altschul et al., 1990) for searching for homologies between a sequence and protein or nucleic acid databanks. The significance thresholds used depend on the length and on the complexity of the region tested and also on the size of the reference bank. They were adjusted and adapted to each analysis.

[0562] The results of the search for homologies between a sequence according to the invention and protein or nucleic acid databanks are given and summarized in table I and table II below.

Table I

[0563] List of putative functions (column “homology with nonredundant protein database-description”, and column “annotations” for the sequences selected as being involved in an activity or having an activity of the toxin or antibiotic type) of the proteins of sequences SEQ ID No. 42 to SEQ ID No. 3855 encoded by their respective nucleotide sequence of the Photorhabdus luminescens strain TT01 genome (genome represented by the sequences of the 41 contigs (SEQ ID No. 1 to SEQ ID No. 41)).

[0564] The nucleic acid sequences of the proteins of sequence SEQ ID No. 42 to SEQ ID No. 3855 can be easily identified by their start position (“start” column) and end position (“end” column) on each one of the contig sequences (“contig” column).

Legend of Table I:

[0565] All of the putative functions associated with the proteins of sequence SEQ ID No. 42 to SEQ ID No. 3855 were obtained through a homology search using in particular BLASTP software (Altschul et al., 1990). The significant identities, or the presence of various motifs (cf. examples) representative of these functions, were in particular taken into account. The description of the most probable function(s) is given in the “homology with” and “Annotation” column.

Table II

[0566] List of putative functions (column “function obtained by comparison on databank”) of the proteins encoded by the sequences SEQ ID No. 5835 to SEQ ID No. 10784 of the Photorhabdus luminescens strain TT01 genome (genome here represented by the sequences of the 9 contigs (SEQ ID No. 5826 to SEQ ID No. 5834)).

[0567] The nucleic acid sequences of sequence sequences SEQ ID No. 5835 to SEQ ID No. 10784 can be easily identified by their start position (“CONTIG”, “from” column) and end position (“CONTIG” “to” column) on each one of the contig sequences.

Legend of Table II:

[0568] All of the putative functions associated with the proteins encoded by the sequences SEQ ID No. 5835 to SEQ ID No. 10784 were obtained through a homology search using in particular BLASTP software (Altschul et al., 1990). The significant identities, or the presence of various motifs (cf. examples) representative of these functions, were in particular taken into account. The description of the most probable function(s) is given in the “homology with” and “Annotation” column.

[0569] In the final column, “HOMOLOGOUS TO SEQUENCE SEQ ID”, the term “#N/A” means that no homology for the sequence concerned had been identified with one of the sequences SEQ ID Nos. 42 to 3855. When a homologous sequence was found among the sequences SEQ ID Nos. 42 to 3855 for the sequence concerned, this is mentioned via its SEQ ID number in this column.

LENGTHY TABLE REFERENCED HERE
US20070020625A1-20070125-T00001
Please refer to the end of the specification for access instructions.

LENGTHY TABLE REFERENCED HERE
US20070020625A1-20070125-T00002
Please refer to the end of the specification for access instructions.

LENGTHY TABLE
The patent application contains a lengthy table section. A copy of the table is available in electronic form from the USPTO web site (http://seqdata.uspto.gov/?pageRequest=docDetail&DocID=US20070020625A1) An electronic copy of the table will also be available from the USPTO upon request and payment of the fee set forth in 37 CFR 1.19(b)(3).

The application's sequence listing, which the Patent Office published only in electronic form, follows.

SEQUENCE LISTING (10784 sequences)

SEQ ID NO: 1 - DNA, 831 bp, Photorhabdus luminescens
  misc_feature (1)..(3): n is a, c, g, or t
  misc_feature (199)..(199): n is a, c, g, or t
nnnctggatgaagaccaattcgtttacatatgcgtgagatatggttttcaaccgtacggtaggaaatatttaacattataccgatttgcttattggtatatttgtgtaacatcaggaaaataacatcccattcccgttgagtaaagcgatcggtcggtggttggaacataatattggcgggcaattttccacgaaatantcgggtgaatgagaaatcctgagcttgccaaccatgatatatcgtgcccatacagcttccgtcttcatgatagagaggatattttgcaaaaaagtaagatgacagaatttgttctttaccaaatatatgtgttacaagtgaacatattctttcttctttttccatcactttttgatcatgagccatatattctttggcaaattcagctccatcccaaggaatttcataatcataaagaccttcatagtcaaaagagcttgaaatattttgaacacgtttacatgcttgattgacataaataaagcatgagtttttatcctttattccccagggttcattactctgctccattgtattaataacttgagaagagatgacatggtacttgtcatgttatgaacatctctttttaatctagggattaaaagaaaattcggtttactgatggaccaaaccttttgggtaattaacatatttagttttgggggcaacattatccttccattagagaccgggatgaaaaaacaattaattccttttacttaatgatcggggtaacacttcgggacggattgctcaacccttccggactgcaaagtgttattttgggacaaaggagatatcaatcactc

SEQ ID NO: 2 - DNA, 708 bp, Photorhabdus luminescens
tgttttggggtaaatctcattaaatacagcctcatttttcataaagccatgataaataatgtctatattagatttttcatttttaagtttctttactttattttttaatttatttaatgctgctccatccccaacaatatttaattcaatctcgtaatttgttttaaataagttttcgataaaacagtaaataggataatatttaaaatcaaaagaaattcttgagataatagaaataactaatttagtatttattactttaggttcagtgattcgttttcgtctagtttctgaagttattggtaaataatagatatcacataaatttaaatttagccattgacatgttgtatcataattaggtttatccatgaataccaaactaaaattctctattagtttattagcaaactggattagatttttttttcttttatagtataagatgtttattaaaaaagtagataaactccctatgttaatatttaatattcttaacctgtttatatattttaatattggagcacataattcatctggttgcaattgccaaataagtatattatcaaaacgtacattatattcataaaatccgcgcatatcttgtgcgctaataacaacgtgggcaaatttaaagccttaatatccgatattaaagtatattatacggcattctatgtaataattttaccaaacactatttttgat

SEQ ID NO: 3 - DNA, 957 bp, Photorhabdus luminescens
gtcggttccgatggagtggagttaatttcgggtagatcaaaacggatatcaatcttttggccattggtagtttaaatgctgggataaaatggtatgcaatgcttgattaactgcaataatcgcattgtcagaagcaattatgattgtcatgttgactccaattttattaaatgtttaaaaaaccacccggccagttttatttaattcaagaataacggcccgttctatgtgtttattgtcaatttgttcacagtgatcatttgcggctaatattgaggataataaagcaatatttctgatattagccccggttaaatcagcccgtttagccagatgggaaaaatcaatgtcatcggataatgtcaattgttccggccaaattgcttgccacatttttttacgtaatatttcatcgggataagtaaaacgggtaataaaggtaaaacggcgattaaaagcgctgtctaaatggctacgattattggtggctaaaatcactaatcccggataattttccaatcgttgtaacaaataagaaacttcaatattggcatgtctgtcttgagcatctttggtttcactgcgtttgccaaataaggcatcggcttcatcgaaaaacagtaccccggaatcggcttcggccagatcgaaaatacgggagatatttttttctgtttcgccaatatatttattcaccacggtagagagatccactttaatcagatcaacgccaagatacccggcaatcacttctgcggccatggttttgccggtacctgattcgccgtaaaatagggcgctaataccggtaccataaccgattttttcctgaaaaccagcgcttaaaatttggtctcggtaattaatggcggcaataatctcttttaattgttgcgttaacacatctgaaaccactaaatcattaaaactgcgtttgggggttattcgttgagctaa

SEQ ID NO: 4 - DNA, 978 bp, Photorhabdus luminescens
gtattaccattgaactcgataacggtgtacttaacgcggcacctgttattacattactccgccaagctataacccgcaatattccattaaacaatattccattaaacaatatcccattaaatcgttggctaaaacaactctggcaaaccgtttctgtttcacagctttgcaaaaagcatctgcccgctgacgaatatcaatatctattggaatattttacgctaaaccacacggataaaaatatatccgataaaaaaccaaccattactcctgttgatatttctaatattcaggcataccaacacttgccgaaatattttactgcaaacaatgcaggcaagaataaatctgatacagaatcaaccatgaataacgttaatttttcaaatgttcaacaacatctgaccaatcaaaaaatagtatcagcacccgataagacacctattataggcaatcattataacccacatcaaactagcaataagtcacactctggatgggctttattaacggataaaaatacatccgataaaaaatcaaccattactcccattgatattgctaatattcagacataccaacatcaggctaatcagcaagtcatcaccgatgatcaaaaaatagtatcagcaccggataagacaccgattacaggcaatcattataacccacatcaaactatcaattgtttttctggctcgatagggattgattcaatatctttatcggctattagcccacacagaacataattcagtaattttctttctgctggtttctcctcggttccccaaattagatggtcaagtaaatcaacagcattgagctgagcttgacgatgaatgaatttctgtttctcaagtagaccaagctggttaaatagtgtgggtagcatcggccacagaattaatatgccggcattatttatctggtatggcagggattgttccgataataaagtctgtccagagtatggcc

SEQ ID NO: 5 - DNA, 689 bp, Photorhabdus luminescens
atgtgctaatatatattgaaaaagaaggagattcaataaatttattatgccctttttgtgcattgcctgaaaatataaatgatcttatatatgcgttgagcctaaattactcagaaaagatatgcttagctactgatgatgaaggcggaaatctaattgcgcgattagatcttaccgggataaatgaattcgaggatgtatatgttaatacagaatattatatttcgcgtgtgcgttggctgaaggatgaatttgcgcgaagaatgaaggggtattaatgtcccgtttcgtatttattttgctgtgttttatcccacatttagggagagctgattgttgggataaggctggtgaaaggtacaatattccatcaagtttgttaaaagcgattgcggaaaaagaatccggatttaataaatctgcagtcaatgttaataacaatggaagtaaagattatggtataatgcaaataaatgactttcattctaaaagacttagagaaatgggatattctgaggaaatgctaattagtcatccatgtctttctgtacattatgcagcaaagttattaaatgagtttatgatgatgtatggaagagggtgggaggctgttggagcctataatgcaggaacgtctccgaaaaagaaaaaagaaagattaaagtacgcagaggatatctatagacgct

SEQ ID NO: 6 - DNA, 852 bp, Photorhabdus luminescens
  misc_feature (676)..(676): n is a, c, g, or t
  misc_feature (732)..(732): n is a, c, g, or t
  misc_feature (798)..(798): n is a, c, g, or t
  misc_feature (833)..(833): n is a, c, g, or t
gcgggctgcagcctggttatgattactgttaatgttgctactactgctgacaatgctgctgctgcttctcctcactgtctccacttccttgaacaatgcgccgtcatgcttcttttgcctcccgctgctccagaaagctaggccgcagatcagaaccaccacagtcaatatcaccaccttcctcttatagattcggaatctcatgataggggctcagcctctgtgcgagtggagagaagtttgcaggcgagctgaggagcaattgcaggtgatatgatgtgctcggctcaagaagcgggcccggagaggaagaagtcgtgccggggctaattattggcaaaacgagctcttgttgtaaacattgatccaactggaatgtcactaatggcgaatcaatattccataaggcatgatggttgctcagaggcaggagaagagcaacgaatacgatcctataaaagataaaacataaataaacagtcttgattatattctgggtattaaagccacaatcagaacaaatatatgctttgtatcttttcttgccttcttcattaccaacttgttccgcggccacattaaagagaacttgtggtaagataagaagatattttattcgttctgctgaccttgctgatgtcgggaaatattctgcatttgataagaggcggtaatngcagatattatttgagtgaaaaaagcgtgctttgggcaccgcgaacgagtcagacncaaggatggtgcggtctcagttatatgtgaattgggacgcgtttatcgttaggtagagactaccanacaccactgcggccgatgagatattttactaactnaaattgtactacggcccta

SEQ ID NO: 7 - DNA, 871 bp, Photorhabdus luminescens
gatcaatacgtttagaaaaaaaagatttataatctaaaggaaaaaagatatattttgtatcatttttttttgaaatttttcgacggaaaaaatgaatgaaagaaaactttttatactgtacattatcggagtaatgataaagtgagcgttttaaaaaaaatattccggtattactttgattattgggtttttcaaaaacaaatttcataaaatataatctccattacctaaaaaattcttataaaatctaagtgatgataataatatccaaattattagaaataatagtttgggttctttctgatatttaagaaacaagagtacaatcattaaatcagacggaaataaaaaccgattaaacattgggctaaaaacagttaaaagagaaagaaatggaggtaataatataactattttgtcgataccttttaagtaattaccgagcgtgagatagcaaacgactgctaaatatatattaatgacaaacgaaatacctaatcctgaagattcatttgtatacactgaactgttgtatacatattgttcaaatttaaagtaaagaaaatcatatccccataacgccgtagaaaaaatgacaaaaaagataatgatattttttagcttgattttaaatctaatatcttcggagttaaaaactagtaagggtaaaatagaacccataggatgaataccaaataaaagaattgatgcgaaatagcgtgtgatgtttttataagaaatgaaaataaaaatacatagtaaagtgagtaaatgaattcttgttgaaaatggaacccaataagtgagtgaaaaataaagataaagatatatagattcccgttctttaatttattgctatatatgctaaaga

SEQ ID NO: 8 - DNA, 1305 bp, Photorhabdus luminescens
ttccgtcgttacctccgggagagatccagccggcaagactggaaagaacagcgctaaaatcttgatacatttgagtatatgaactaacggcatgttcatatactttcagatactgttcattaatatcattgatggagtttgcaattttagcccacagttctctatgagatatcatttgatctccatcaagctcggcttctttcggggctgaatgtaataattctcttgcgtctttattaattggatattcgttcctggaaagaatatccaatagttgagcggatttatttacatccatgctaatctgagatgaatgtaatgctatttcttctagcgatgttttagtcaacgttttttgtgaaagctctttctttaatgcctgatttgttgttctgatattatgaagggtgtcgttgagcatagtaagggaacttacaggatgagaactggtcgttgtttttatatcagaattaactgtttcggttgatgaaccgttggtattgtttggactgaatgatgaggtggaaatactattagtcagagttgttatattcatggttatttccttacaggaagagccatatattattatggctcttggatatattaagctcgaatgttaccagcaatctgactggctgccgaattctttgattggttgatgctgtcaattatattcaataatttttgtattaattgatttgtcgcttgggatgcttctttagatacttgggatgcttcctctgcttgtttactgctggcctgactgattagttgttcttcttcttcaagagcagatgcataacgccctcctgatgtggatatattaccagcaacggctgatgtttccattgttgcacggccaatgttttgtttttgctgcgcagaaagggtattgagctcgtaagttcttctctgggtgtcaattttatcctgcaaagaaatatcgggagaactaagagaagttttatgttcagttgacagggatatattatctggcgccagtttatttttacctaaaaattttgtgctagagttagtttgtggtgaggtgatatttgtatctatttgtttatttaaccctaatttagaacctgcaagctctttttcaagagattgagcagtggcaaggttctttcttaaggctcctttttggtcgctaatccctgaatgcgtttttttggcaccgatacccgttatacctacttgtgtgactgctccagtaatgcttgatgatagggctgccaggccttgccgaacaatgttctctgcagctgattttgtagcatcgaacgcaatcaatga

SEQ ID NO: 9 - DNA, 1961 bp, Photorhabdus luminescens
gcaaatcaatatgtcgatttgcatgagggattttatgcatcattgtccatatataacaatattgatttctatattaagactacaaccttcgattcattaattagtgtctttgaagcagggagagaggcagatgattcgacatggtagtaataagttgaaaatatttattttaagtatattgctattaacactgagtgggtgtgctttaaagtcatcatctaattctgaaaaagaatggcatattgttcctgtaagtaaggattatttttctattccaaatgatttattatggtcgtttaatacaaccaataaaagtataaatgtttactctaaatgtattagtggtaaggcggtttatagttttaatgcaggtaaattcatgggcaactttaatgttaaggaagtagatgggtgcttcatggatgcacaaaagatagctatagataaactattttctatgctgaaagacggggttgttttaaaaggtaataagataaatgataccatccttatagagaaggatggggaagttaaattaaaattaattcgagggatataattgtattgtgagtaaatataaaggtctaaatacaagtaatatgttttacatttactctagtggacatgaaccaggtaacgttgagcttgtaaaagataaagaacgtaacataattgagctggctccaccatggaagggtttttttttgtccgaaatcaaaatataacaattcagtgataatgtgaactatcattatcgctttaacattaatagttgtgcaaaatttcttgctttttgggactatttcagtggtgctctagtagagcatagccatgctgaaaaatgtattcatttctatcatgagaatgatcttcgggatagttgtaataccgaatcgatgcttgataagttaatgttaagattcatcttttcatctgaccagaatgtaagtaatgcactggctatgatacgaatgactgagtcatatcatttggttctttatcttctgagaactattgagaaagaaaaggaggtaagaataaagagtctgacagagcattatggtgtgtcggaggcttattttagatctttatgtagaaaagctttaggggcaaaagtcaaagaacaactgaacacttggcggttagtaaatggtttattagatgtatttttgcacaatcaaacaatcacttcagctgccatgaataatgggtatgcatcaacatcccatttttcaaatgagataaaaacacgactaggcttttctgcaagagaattatcgaatattacttttttagtgaaaaaaataaatgaaaaaatttaatattaaatctttgactctcttgattgtattgttaccattgatagttaatgctaataatattgactctcatttattagaacaaaatgacatagcgaaatatgttgctcaaagtgatacggtaggatctttttttgaacgtttttctgcgttattaaattatcctattgttgttagcaaacaagctgcaaaaaagagaatatctggggagtttgatttatctaatccagaagaaatgcttgaaaaactgacattacttgtgggactcatatggtataaagatggaaatgcattatacatatatgactctggagaattaataagcaaagttattttgctggagaatatatcacttaattatcttattcagtatctgaaggatgctaacctttatgatcacagatatcctataagaggaaacattagtgataaaacattctatatatctggtcctccggcattggttgaactggtagctaatacagcaactttgcttgataagcaggtttcttctattgggacagataaagttaattttggggttataaaattaaaaaatacatttgttagtgacagaacttataatatgagaggggaggatattgtcatcccaggggtggctactgttgtagaacgtttatt

SEQ ID NO: 10 - DNA, 2595 bp, Photorhabdus luminescens
atgctgaacctgctctgataactttaaaagttgatcatcatttaatgtggttgttaatacgggatttttaccgacattaagtggaatatgcgctgcaatctgctgataattttgtgatttttgtgtttcggaagaactttgagtttgttttgtggatatatctgtatataaagtctgggttggttttgtgttttgaatttccataacattctccttatttgtatcaagcagtagtttgttgcaaaattgcttttgcaacatcagttctattagcctgagagttggacattgaggctaatagatctgcaattacttcctgcaattggccgaatttttctattgcttcactgatatattttgacagttgttcaacttgatatttcgataatgtcaggtctgctagatttgtcgacgcgctgttctggaaaacagcagaagcgacacttcctcccgcttgtgtggcagagttaacactttctcctaataaaactgcttggtttaaatgggtggaaataatttgtttggatattacttcatcacccgctgcaccaagaaatttatttaatctggcaacagcattagtgattaaatcgtccagttgagaagaaaaattcttgagaaactttggtataaggtctgtgagggttttacctattattttgccaatattttctgcaagttttgctgctgcctgtttaccaacagtggctacgagaacgactgctgcaactaggacaagagcgcctgcgattgcccccagaatagagccaatcattttggcttttttcgagtcgacgcccaagccttcgagcatttttgtaaatgcatctgaaaggagtttgattaagggttcaatgactgctttcatgatcggattcagggcttgttccatgaaggaattgccggtcgctgcttgtactatagcatccgtaaccataagagctaaaccaacagctgccagtgctagagaggctcctccagaaaaagctgctgcaacaacactaacgatagttaaaagtgccccaagtattttcccaacacaacccattactctgttgagttcttctgctttacgtacttcagcagcatactcatcagattttctctccatttcaatttttcttgattcttggagagactggaatagagccagatcattttttaaagattcttcattattttttccaactagttgaataaaggttgccatcaattgagtaacactggcaagtccggttaatgatttctgctgggttgatagctgttcagcagatgctgtgtttgaaaatgcagaaaaagagtctatttctttttcgagttgcattgatttatctgtaagtttgctatgaattgacagggttttctgctcaatcaatgtcctgtctttaactgctgcgtcttttttgatagtgagttgtatttcttcccggcttaattttttcttttctggtgactctggatcgagttcggataatcttgtttgaatttggttaattttattttctaggtcttttattttagaatctgcgttttttagtttattaatttgtttttcatagtctctggttagtccttcagtttcagatagaagagtgttaattttatcggagaattctaggtttttttgctgtcttgcctgttgctgggacttccaagcagtaattttatttgttaatgcagttaaagatttttcaccgagtatttgaataaggtttccaattaaaagcgttagttgggaacttgcatttaatgactttggtgctttaagttcagggattaatatatttgaagttgagtgtgcattagttgtattaatattttggttagcagtaagatcagcaattgtaagagaaaataatttgttagctgcatcatttgcagcttggatagtattgtctccaagctcagtggaagtcaatattttggcaagaggaaaaccagtggttgtggtgcttacattatgcataataattactccttgatatcctgaattgcgtccaagtatgattgtgcttttatttttaatttttcatcattgctgtgttgaattacgagttcgaagcactctttagcttttaagggggctttcaaccgaagctgacattgtccagtatggaatactggtgtatagtcattttttcctaatgcaaaagcgacagcataaaggtctgctgcttgttggaactgttcttttatctgataaatagctgcgagtcccataatgtagtctacattgtaaaagtcgtatatacataaaaacctgaagaaaacttcagcttcctctattcttcctttgttgtaaaagtcataagcatatgaataaatgtcatccatcatatcatcaggaattgcattaatatctttcagtgtagcgccagagttaattgcatcaattactgcagtagagatgctttcattttcggtgatatttaaagacataaggtctcctttttgtctgctttactttaataagtataagatttaatataaaagatttaatttgtattgctttgacggtatacagcctttagaacctctgcgcttatttctatttgtaaaacttttgttgattcattaaatattttatcgtagacg

SEQ ID NO: 11 - DNA, 1268 bp, Photorhabdus luminescens
taatctatcgcttctgtcgagttccagtgccaatgcataattgagcttaccattatcacctttaactacagccgccaaccttggatcttgcgaagcaatatgactgaggtttcgttgcaccaagtcttcttttaacttcggataagttgccgcattttccgcaccacttgtgtttttccctgctaactcaggctgagcatctttgccggcattattttgcgatgattttggtgacgacttcggccctttggctccctccatcacaataggcagcgtcatcgccattgcagcggcagtctcctgactcatgcccatcgcctcaaagcgttttgtccagccgagttcgcctaccttgcctgtggccgcctgacctaacgtattcaccgccgacaggtaatttctgaactcaaccggcaatgtgccatcccggtccatatttttgagggtacgttcaaacaccggccactgatcaaccagataaccatacttctgtgcacactgggtcgggttgctgttgcagaaatccatcatttcctgctgattgcggatattagtgtctaccatatccttgatcacttgtttgcagctttcgccttcacaggtgcgggcttgatgcgcaaaactgtccagctcattcacgctcagatagttattctcaacaacaacccattccattgcgacgttgaccgccaaacaccgattttcccaatgccctcagccagttaccacccgttttttccaatgggcgttcaccgccggccccaaaaccccctgacgcgcttttcgcccccgaaggccggtttttcccgccgcgctctggtcagtgtagcgcctttttcggcaacgggcgaacgtcgcccaactcgcttgggcggcgggtgcccgttctgcgggcgcgggcggcacagagcccgcaagcggcgcccctgcgacgctctgaggcactgtggcttcggtttgcgtatgaccttgcatgaccacgcggttttgttttgttcagggaagcccccgggggctgcacctgtctttcctacacaaatattttaacccgcccccgcgttattgaacttttccctcatagattgatctcaataaaaaacacgacttgaggtaatctttatgttttcaaccagcgccgaacaatgggcaaatgacacgtttcaacatgcggaattaggtgataaacgccgtaccaaccgcctggtgaaagtggcctgttcgttggctaaccatataggacaatcgctcgtgcaatctcttgactctcc

SEQ ID NO: 12 - DNA, 1227 bp, Photorhabdus luminescens
ccttggcgctgcaacttgttgccccggtttcgcggtagatatcttttcagcatttttgataagctgttgatgataaatagtattagccgatttatcacccagattcgttgtgccttgactgtttttcccaatcttttccagcgccgctttctctgtattaacaaccgcgcctgtgcttccttttgttgttggcgatgatttcggccctttgctgccctcaacaataacaggcaacgtcatcgccatcgcagcggcagtctcctgactcatgcccattgcttcaaagcgttttgtccagccgagttcgcctaccttgccggttgccgcctgacctaacgtattcaccgccgacaggtaatttctgaactcaactggcaatgtgccatcccggtccatatttttgagggtccgctcaaacaccggccactgatcaaccagataaccatacttctgtgcgcactgggtcgggttgctgttacagaaatccatcatttcctgctgattgcggatattagtgtctaccatatccttgatcacttgtttgcagctttcgccttcacaggtgcgggcttgatgcgcaaaactgtccagctcattcacgctcagatagttattctcaacaacaacccattccattgcgacgttgaccgccaaacaccgattttcccaatgccctcagccagttaccacccgttttttccaatgggcgttcaccgccggccccaaaaccccctgacgcgcttttcgcctccaaaggccggtttttcccgccgtgccattgtcagtgtagcgcctttttcggcaacgggcgaacgtcgcccaactcgcttgggcggcggatgcccgttctgcgggcgcgggcggcatagagcccgcaagcggcgcccctgcgacgctcgggggcaccggggtttcgggttgcgcatgaccttgcatgaccacgcgattttgttcagggaagcccccgggggctgcacctgtctttcctacacaaatattttaacccgcccccgcgttattgaacttttccctcatagattgatctcaataaaaaacacgacttgaggtaatctttatgttttcaaccagcgccgaacaatgggcaaatgacacgtttcaacatgcggaattaggtgataaacgccgtaccaaccgcctggtgaaagtggcctgttcgttggctaaccatataggacaatcgctcgtgcaatctcttgactctcctgc

SEQ ID NO: 13 - DNA, 1235 bp, Photorhabdus luminescens
ggcctcgtcccggtcaaaggcaatcagcacccgcttcacgccgtgatactgcaaggcttcgagatgctcacggttaaacccgttcaccccgaacgcggcgatcacgttgcggaacccggcacaccagaaggtcatagcatcgatcagcgcttcgcacaggataatttccgcagcggctttcatcgctgcctcattccagaccccggctagcggtgaggacaggtacagatgcttcgggctgtctttcaggactttgtaatccggctgggttcggcgaccatacagttgcagcacccgcccgcggctggccacactggtcgattcggcccagccgattatcggcaccacgacgcagccccggaagtggtcctgccgggtggtggtacgcaacacgcccagccccgacagcttgccgcgcaactgctgaccttcctgactgtctttggacggcaacaatcccgcggaaccgctgataccgtgatgacccgcataaccgagccggaagtggctgaccagttcaggatgattcagcccgcgtcgtgccagccaggctttggcttccggtgatgccagtaagtgctgatgataaaaatcaatcacctgatgcaacagcgcctgcccgtcatcgtccaggtcggccagtttcgggcgcggcaggggggccgcctgtgactccggcggggcggctaaagaagaagcggccacaactgcattgtccatgtccggcaacccggccagctcccgcagccggcggatagcgattttcagcgtcaccccttccgtttgtatcacccagtccagcaccgaccccgctgcgccacagccaaagcagtgatacaggttcttagccggcgatatcaccattgagggcgttttctcgttatggaacggacagcgcagcacataatcctcaccgcgttttttcatcggacggccttgcttacgcgccagccccagtaacgagacggtttgctttaagtggactaaatcggtgtcgggaacgcgggtcatcaatgacctcctgtaaaaacctgtcaagatgctatattgatatttaaaacatatctgataagatatctaaaaacaagctttttaaaagggggatatatagtgatatcaagttcaacaacctggtttctcgatatgcagttccctgaacggcttaccacattacgcaaggaacgcgggctcactcagcaggcgctggctgatatggctggtgtggcagttttaca

SEQ ID NO: 14 - DNA, 1359 bp, Photorhabdus luminescens
agatattcgatgatatcggcttcacggtcacagacagaaatcacgttggccatctgctcccctaaccggctgtcgacggcttgtgaggcccgttcccacttataactctctttcccttcataagggcgtgtatcgcgttgtcggcttttgccataatcactgacatctcgacaccagcgctgttgctctatcaaccccacgacctgttgttcttcaggcgcaaataacaacaccgagtgtgcctgcatgccccgggatttttcctttgaggtggtatagccgagttcatcggcgaccgacgcatgggaaaatgacagggttgtcgtgtcttccagcgctaacaggcaatgataacgttgagcgtgagcgacggtggcggtaaatccggcttcggcgatggcctgaggcgcaatggcggaatttcgggtcagtcggtaggccgcttcaacatcggcaggagagtcaagagattgcacgagcgattgtcctatatggttagccaacgaacaggccactttcaccaggcggttggtacggcgtttatcacctaattccgcatgttgaaacgtgtcatttgcccattgttcggcgctggttgaaaacataaagattacctcaagtcgtgttttttattgagatcaatctatgagggaaaagttcaataacgcgggggcgggttaaaatatttgtgtaggaaagacaggtgcagcccccgggggcttccctgaacaaaacaaaaccgcgtggtcatgcaaggtcatacgcaaaccgaagccacagtgcctcagagcgtcgcaggggcgccgcttgcgggctctgtgccgcccgcgcccgcagaacgggcacccgccgcccaagcgagttgggcgacgttcgcccgttgccgaagaaggcgctacactgaccagagtgcggcgggaaaaaccggccttcgggggcgaaaagcgcgtcagggggttttgggtccggcggtgaacgcccattggaaaaaacgggtggtaactggctgagggcattgggaaaatcggtgtttggcggtcaacttcgcaatggaatgggttgttgcggataataatgcccttagcatgggaagtctgtttggtgccgaaggcgctaaacattttgaaggtgcgggttcactggctcaaaaaatggcccaatctggggcaacatccgaagaaatcaacgcagccttaactcactatctaaaagggcaagtccctgatggtcaggacccagcaaaaggtttgattattgcgtggggtaatttctttggtgttccgttggatgtcgtgttatcaaatgagcagatgacgccacagaaagcggcggaaattgttgccggagggatacctacca

SEQ ID NO: 15 - DNA, 1735 bp, Photorhabdus luminescens
tttcacatcaaccttcttacctgcctttagttctttagcccaagaattctccatctgcttccaggcacctttatttaagtttccatccataggaacaacatttaatcgctcgcctgggccaccaaaaatactagcgattaaatgcccgccttcatctcccggattaccacatttacctgctttacattgctgataagtattacggtcattccagcttaatccatctgtatgataaattttctccccgcttgcatgtcttacatgataaattttattgggttcaggcttattcagtaccttactccaaccacctttcttaccttgttcaataagtacaatgtctttctctgcggtagctaaatttgatttattaacttgctgattatgagcagcattagtgccttttgtacccgtattgcctgtgtcttttgtcgcaggcttcttcccggctatccctagtccaattatcccgctactgccgcccactttcggcattacaccaaactgttctgcgaactccttgccttcaacaaccttctttaccacatctggcagcgactggtaaatcgcctgggcactttccgcattctccgcctgcacaaagcggtttaactgtgccatctcctcactactgagactggagaagaaagaagtccggttcaggccactggcgacgtctgttcccgagttcatcatttcccagacggataccacacagcccggattatgggagcagttatccgcgacaccttcctgacgatttttctcgctacgctccttaaacttgtcgtaaatcgtctgcttgtttgcgccagtcttttctgcttccagcagttcctctttcagttcgtggacatctttggccgtcaggaaattattctccacaacaacccattccattgcgacgttgaccgccaaacaccgattttcccaatgccctcagccagttaccacccgttttttccaatgggcgttcaccgccggccccaaaaccccctgacgcgcttttcgcccccgaaggccggtttttcccgccgcgctctggtcagtgtagcgcctttttcggcaacgggcgaacgtcgcccaactcgcttgggcggcgggtgcccgttctgcgggcgcgggcggcacagagcccgcaagcggcgcccctgcgatgctctgaggcactgtggcttcggtttgcgtatgaccttgcatgaccacgcggttttgttttgttcagggaagcccccgggggctgcacggggcggcgatggcgagcacgggaatgagcaaggagcctgcgactgcgaaccgggcgcagccagtgcagcggggttggggcggggggaagtcaatgagcggaggccgcaggccgatctgccttcagggttgttggccggacgttggcacggcagctaaagaagaactcagagttgccgatgtccggctcagtcggttagagcataaggcgcagccttgtgcgccacacccgccaatgctgacccgcgggggcgcaagacataatgccaattatacgcattaagccgctcatcaatgctcaggcggttgcccgggctcaccggcgcagtgcgtataattcccccgcattatgttcaataggcgttgggcggcctggaccggcttaacggggacgctcgtggttgagccgcctgacgactatttacccccgcgtgcgccgatgccgacgggcagtccggccacggtctgcccccacaccgaacccgcccaa

SEQ ID NO: 16 - DNA, 6050 bp, Photorhabdus luminescens
agatcaaatatctaattttaaggctagaaagaggaatgataacatggaaaatgaattaattatttcatctcaagttattaatacaatggatcagagtaatgatccttggggaataaaagacaagaactcatgctttatttatggtaattcagcaacaaaacagttcattcatgattttaaaaaatcatttaattatgaagggctttatgatgatgatctcaactgggatggagctgaatttgcaaaagaatttattgctcatgataaaagtgtaatggaaagaggaggaagggtatgttctcttgaaacacatctgtttggcaaagataaatttctatcgtcttacttttgtgaaaaaacgcctatttaccatgataacggggattgcataggaactatatatcatatgtggaaagctcaggatttttcattcacccggctattttatggaaaacttcctgcttctatattatttcaaccaccaactgatctctttactcaacgggaatgggatgttattttcctcctattacacaaatataccagtaagcaaatcggtaggatgctaaatatttcctatcgtacggttgaaacccatatatcacgcatatataaacgaattggtcttcattctactcgtcaattagaagattattgtcgcaccaatgattatgatctctacgtgccaaaaagatttgtgcaacctagaagcaaaatgtttccttgaccattagattaaaaaggagtttttactgatatgaaaaagaactatgcactatcacctcagattattagtacaatggagatgaacaatgaaccgtgggaaataacggatagttcttcaaactttatctacagcaatgcagataaaaaaatttattcatcaatgttaaacaattatttgattataaactatcctagggtttgaggtagtcgtgagttaaatatcaaatatctaattttaaggctagaaagaggaatgataacatggaaaatgaattaattatttcgcctcaagttattaatactatgcaacaaagtaatgaaccttgggcaatcaaagacaaaaactcatgttgggtttttggtaatttggcatttagacaaatccaaaatctcccagatttatttgattatgaagggaaaaatgatagtgaactcccctggaacggggctgaatttgcaaaagaattcgttattcacgataaaaatgttatgaaacaagagaaaagaatatgttcacttgaaacacatacatatgggaaagataaatttctatcatcttatttttcggaaaaatatccaatctataatgatgaaaacgaatgtatcggtctctttctccatgcatggaaagcccaagatttctcacttactcgactattttatggaaaacttcctgcatctatattatttcaaccaccgactgatctctttactcaacgggaatgggatgttattttcctcctattacacaaatataccagcaagcaaatcggtagaatgttaaatatttcctatcgtacggttgaaacccatatatcacgcatatataaacgaattggtcttcattctactcgtcaattagaagattattgtcgcaccaatgattatgatctctatgtaccagaaaggtttgtgcatccagaaagcaaaatgtttccttaacccttaaattaaaaaggagttgttactaatatgaagaagaactatgtcatctctcctcagattattaatacaatggagcaaagtaatgccccctgggcaataaaagataaaaactcatgccacatttatgtcaatcaggcatgtaaacgtcttctcaatatttcacgttcctttgattttgaagggctttatgataatgaattaccctggaatggggccgaatttgccaaagaatacatcgctcatgatcaaaaggtgatggaaaaagaagaaggagtatgtttgcttgtaacacatacttttggaaaagaacaaattctgtcatcctatttttttgaaaaacatcctctttatcatgaagacggaagttgtatgggaactatttatcatggttggcaagctcaggatttttcattcacccgattatttcatggaaaattacccgccaatattatgttccagccaccgactgatttatttactcaacgggaatgggatgttattttcctcctattacacaaatataccagtaagcaaatcggtaggatgctaaatatttcctaccgtacggttgaaaaccatatctcacgcatatgtaaacgaattggtcttcattccagtcgtcaattggaagaatattgtcgcaccaatgattatgatctctatgtgccagaaaggtttgtgcatccagaaagcaaaatgtttccttaaccattagattaaaaggagttctcactaatatgaagaagaactatgtcatctcccctcagattattaatacaatggcgcaaagtaatgagccctggggaataaaagataaaaactcatgctttatttatgccaatcaagcatgtaaacgtgttcaaaatatttcaagctcttttgactatgaggggctttatgattatgatcttccctgggatggagccgaatttgctgaagaatacatgactcacgacagaatggtgatggaaaaagaagaaaggatgcgttcacttataacacatgtacatggaaaagaacaaattctttcatcttatttttttgaaaaacatcctttttatcatgaagacggaagctgtataggaacaatatatcatggttggcaagctcaggatttttcattcacccgactatttcgtggaaaattacccgccaatattatgttccagccaccgaccgatcgctttactcaacgggaatgggatgttatttttctgatattacacaaatataccagtaagcaaatcggtataatattaaatatttcctaccgtacggttgaaaaccatatctcacgcatatgtaaacgaattggtcttcattccagtcgtcaattggaagaatattgtcgcaccaatgattatgatctctatgtaccagaaaggtttgtgcatccagaaagcagaatatttccttaatccttagattaaaaaggagttgttactaatatgaataagaactatgtcatctctcctcagattattaatacaatggaacagagtaatgagccctggggaataaaagataaaaactcatgctttatttatgtcaatcaggcatgtaaacatcttcaaaatatttcaagttcttttgactatgaaggtctttatgaatatgaattaccctgggatggagccgaatttgccaaagaatatatgcttcatgatcaaaaagtcatggaacaggaaaagagaatatgttcactcgaaacacatttattcggaaaagaacaaattctatcatcctattttcttgcaaaatatcctctctatcatgaaaacggaagctgtatgggcgtgatatatcatggttggcaagctcaggatttttcattcacccgactatttcgtggaaaattacccgccaatattatgttccagccacctaccgatcgctttactcaacgggaatgggatgttattttcctgatattacacaaatataccaataagcaaatcggtataatgttaaatatttcctaccgtacggttgaaaaccatatctcacgcatatgtaaacgaattggtcttcattccagtcgccaattggaagaatattgtcgcaccaatgactatgatctctatgtgccaaaaagatttgtacatccagaaagcaaaatgtttctttaacccttagattaaaaaggaatctcactaatatgaagaagaaccatgccatctcacctcaggttattaatacaatggcgcagagtaatgaaccctggggaatcaaggatgaaaactcatgctttatttatgctaatcaagcatgtaatcgcgttcaaaatatttcacgctcctttgactatgagggtctttatgattatgatcttccttgggacggagctgaattttctgaagagtatatggccaatgataaaatagtaatggaaaaagaagaacgaatatgctcacttgtaacacataaattttttaaagagcaaattctgtcctcttacttttttgaaaaatatcctctctatcatgaagacggaagctgtatgggaacaatatatcatggttggcaagttcaggatttctcattcacccgattattccgtggaaaattgcccgccaatattatgttccaaccaccgaccgatcgctttactcaacgagaatgggatgttattttcctgatgttacacaaatatagcaataagcaaatcggtataatgttaaatatttcctaccgtacggttgaaaatcatatctcacgtatatgtaaacgaattggtcttcattccagtcggcaattggaagaatattgtcgcaccaatgattatgatctctacgtgccaaaaagatttgtgcaatctggaagcagaatgctcccttaacccttagattaaaaaggagttgttactaatatgaataagaactatgttatctctcctcagattattaatacaatggagatgaacaatgagccgtggagaataacggatagttcttcaaactttatttacagcaatgcagctaaagaaaaaggagtaatacatggacaataaattaattatttcatctcaagttattaatacattagagcaaagtaatgatccttggggaataaaggataaaaattcatgctttatttatggtaatttggcattaaaatctattaagaatatttcaagttcatttgaatttgaagggttttatgatgatgaaataccttgggatggagccgaatttgccaaggaatacatcgctcatgatcaaaaagtgatggagaaagaagaaagagtgtgttcactagagacacatgtatttgggaaagaacaaattctgtcatcctacttttgtgcaaaatatcctttttaccatgaagacggaagttgtatgggaacgatatatcatgcttggcaagctcaggatttttcattcactcggttatttcgtggaaaacttccagcttctatattatttcaaccaccgactgatctctttactcaacgagaatgggatgttattttcctgatgttacaaaaatataccaataagcaaatcggtataatgttaaatatttcctaccgtacggttgaaaatcatatctcacgcatatgtaaacgaattggtcttcattccagtcggcaattggaagaatattgtcgcaccaatgattatgatctctatgtgccaaaaagatttgtgcaatctggaagcagaatgctcccttaacccttagataacaaggagttgtactaatatgaagaagaactatgcaatatcacttcaatttattaacacaatagaaaagtgcaatgagccgtggggaataaaggatagttcttcaaactttatctatggcaattcagctaaaaaagatttactcgtgactttaagcaatcatttaattataaagaattttatgataatgaaccaccttaggattttaggtagtcgtgagttaaattgattataagattaaaaaatccaatttcaaggctaaagaaaaaggagtgataacatgagcaataaactaattatttcatctcaagttattaatacaatggagcaaagtaatgaaccctggggaataaaagataaaaacacatgctatatttatgtcaatcaagcatgtaaacgccttcaaaatatttcaagctattttgactatgaagggctttatgagcatgaattaccttgggatggtgccgaatttgccaaagaatatatggcccatgacagaaaggtggtagaacaggagaaaagaatatgttcacttgagacacatatacatggaaaagaacaaattctatcatcttacttttttgcaaaatatcctctttatcatgaagacggaagctgtgtaggcattatatatcatggttggcaagctcaggatccctcatttacttggctatttcatggaaaact

SEQ ID NO: 17 - DNA, 6348 bp, Photorhabdus luminescens
gatcggcattactccctattgagggagtttaagaaacaatgtttgcacctgagtttttgatggcttaaaaccatgatgaatataaaactgttttgcgttttccgtaagcgcatgaaccataattgcacgcacaccgatattttcggcaaccctgtaacaacgacgaactgcatcatgaagtaaatccgcgccaagcccttttcctcgaaatgacacatctacagccaggcgtgcaagtataattacaggaatggggtctggcatattgcgccgaaggttacctgtagcttctgtatgattgacactaccagtggccagtgagtaaaaaccgactatttgttgcgtaccttttctgcatacaacaaaagtccgggtggctccgattgcctgattttttagctccttctgctttaaccagtcatcaagtacagcttcaccgctgacaaattcagcgacctgatgaaatgaggataaaggttctggtgcagttacacatcccattgaggtttccttgccagcaatttttcgatggcaggatcatctgcaaccggagcatcaagcatttcaatgaactcttcatattgcctgtcattaaaattaaacacccgccggtcgagaataacatcttcagcagctttacaggccatttccagaatgaaatctgtacgcgacttatgaagaatttctgcagcagcatcaatgagtatccgctgtgattctcttgctctgagattgagctgaacacctgatttcataaagcctccgtatatcatttgctttacaacaatagcatattgacaatatatagcaaatgatatacacaaagtaacagattacagatgccgcgtcagcggcatttacctctgtggacgtaaccgcactcaaaggggatatcgggtggcgcaggggcaccgcccccctacgctcccacggaaccgtacgtgacactctcgcgtcatacggctcttgtcgttgaaccattcaagtatcgtaagctaagcaccagtgtgcaaacagcgtcgggcagtcgtgacgaattcgcagtaaccactcgaatgcacgcaccagactacctcgcgctcgcttgtgtttgcgggcaatccacttggccaagtgcaggtcaacctgcgccattaccgggtatagcttcgattggtaacctcaaacgcctcgactgactgcccatcgacacctgccgcacctcgattagctttgacccgctggtatgctttccaaaccgcatacttagagacctcgaacggctttggctgactcatgggctcctcccggctatccggttgaccgataaaccagccccaacgactgacccccttcgctccatgcccattacaggcacttcctcactactacgaagccatctgcccctgtgtctcgcatcggtactcaggcgcttgcagtgcctctgctccgcgccgctcccttagcatcgagacgacaggttcccacgttccgtgcgagagcctgtgttgcgttcatgctgcctatatgccggatgccgcccagccagtaccagatatctgctggactcgtcatgcgctgcgtagatagcacattttcgacatcgcctagaggttcctttcgacacttcatcgacagttcactttcgttcatctccgcaacacctacctgacacatgttctgcgccttttaaccttgacgctcaccaccaccgctcttaacggcagcagctcaaggcggtttgaaggctgcgtctggacgccgcccctcatctctcatacagcattgcatccaacatcacgccactggatgcattcgtggcacacctacgccggaaacgccgaaattcccggcctgtgatttttagtggtccttcggtacttcagtaactccatcagctatcccctgagcaagtcgttccatccatttcgcaaatcgaaaatacccggggtattgcagacaaatataatccatctgaacttttgaggtgctgtccatcacccgtttaaagtaaccggctcatttaaaccgtctggtctgttacctccggttccacaaaaataatgtccatcattttgaaggtaagcgccccgagaagtacgtagcgtaaggattattttacagacgagaagttccagggcagcagttcatgcacttggttcgacggccagtcattgagcttctcgatcacttcgcgcaaccagtcctccggctccacttcgttctgtttgcaggtgaccagcagactgtagatgatcgccgcactttctcctcccttgtctgagccgaaaaagagataattttttcttccaaccgccaccgatcgtaacgcgttttcaccgatgttgttgtctatttccacccagccgtcacgacagaactcgttcagcgcattccagtgattcaggatatagtcgaacgccttcgccatctccgcatgtttcgacagcgttttcctctgcaactgtatccagtcgtacaacgactgcatcaactggacgcttctggcttttctgactgcaagccgttcctctgccggactgccacgtatctccgcttctatgtcgtataactctgctatccgtctgagcgcttcctgagtcatttctgtcggacggcgcacatcctcgtcatggatttttcggcgggcgtgggccaggcacccggcttccttcacccggcccgtttcgtacagtacgttataacctgcataggcatcagcctgcagtacgccctgatactttgccaggtggagctgcggatgttctcctttgcgatctgccgaatacgcgaaccagacggctgccggcagggatgaacccgcattacgatcatccctgacgtatacccacagacgacccgttttcgtctttccgttccccggggccagtactttcaccggagtgtcatctgcgtgcacctttcctgcctccagaacatagtcattcagcgctatatacagaggacggagtttgtctgccatttctgatacccagcgcaccatggtattacggctcagctccacgccctgtcgcgcgtatatttctgactggcgatataaagggatatgttccatatatttgctgaccaggatccgtgcaagtaaccctgcactggcataaccgcgttcgatcggtttaggaggaagtggtgccgatgacatcacaccggctacaggccagtttgggacgtatggtttcgataactttaaaggcggtattaatgatatccagttgctctgagattgtttcccccatttctttcagaacacctccacaggccgggcaactggtttcagcaggcagaaggcgatgtgtctcccggggaagttctgccggcagcggttttcgtgaagattttcgtcccggggattcaggcttactggcgatcgggttttctgacgggggactggtgtcaggtgaatctgtgactgacgatgcatcttccagaagatttctggctgtgttcagccggttttccagttccgacagtcgtttttctgcctgtcggatctgattttcaagcttatgacgctttttctctgaactctggccgaacaacatacgacgcaacctgtcgagttgcgctttcagccgttcaatttcctgctcatagcccgcgacctgacaggcatactgtcgaagccgactctgttgcttacgcaacatggctttaagcagctcaatatcatcggggagttcattgttcattcccttgttttatcacgggttatatccggatgccaggccgttctgtccgtttgggatgttgccacgcgatcccctccagtagcatggataactgagctggcgtcaggtgcactttcccttcccgggtcaccggccagacgtttggtgaacaggcataacccgtcacgatcggcccacagtattttcaccattttgccactgcggccccggaagacgaagatatgcccggagaacgggtcatctttcagcgtgttctgcaccttcgaagccaggccattgaagccacaacgcatatctgtgatgccagcgatgatccagattttggtaccggtcggcagcgttatcatcggataccccctttcatttcgcggattagcgcccgtaacagttccggagtgagagggtcaaacagttttaccacacctgatttaagatgcagctcgcaccgtgggacgtttccgggagccccctcagggcgctcatcatgcttgttacgccagaagggatttgtaactggtctggtcggctccggcgtatcagtcagtgccaccgggacaggcatgcattcctgtatgtcatcatcgctcagtaagccgtcctcgtactggcttttccatttaaacagcaggttatcattgatatcgtgttctctggcgatccgggcaacaacagccccaggctgtaatgcctgcttagccagacggaccttaaattcacggctatagctggttcgccgttcttttcgccatgagccttctctgatttgaggctctgttaattccttctttctgttggcataaaggatggcgtcaagttgagcgaatgaaactgaatcgggcaatggccatgcgataccggatgcaagaaatcgctgaaaaagcgtatgtattgtggaatgactgagacccagacgctgagcgatggcccggatggtcagtttatcttcaaatcttaaacgcagggcatcaggcaaataagaacggaagcagggaatatcttttgctgtctgggaattcatcgttcgtgtccatcaatatagatgggcgcgattgttgccagacaggacaattttcacaagacgtcgctgatggggcgcttacattaatcccgtactctctggccggttgggccacgcaggcccctagctggtaagatttttcaataagatcaagcttaaactccatagagtcatagagtaagaggcacgaatcctgcgggggcgaagagaatctgacattgatagagtccattaacgttataagaggactctatcatcgccaatcatcagacattgaaatagacgacactgagatgacgcttacaattcttttggtttctgtaataagtaatctgacatcccccgtgcccagaagaggagagggatatcaagcccaagggttaataattgatactacggttaaaattgccttcagtaaaggaaacgtgattaaattcaggggatttcagagtgaaaaccatacaacatattaaaatctgttcatttagctataatacatacaagaaagtgtccagttagataatgttatctaaataaccacagataaaaacgcacataattggggggggggggatgaaaatacctgaagcagtaaatcatattaatgttcagaataatattgatcttgttgatggaaaaacgaatccgaataaagcaacaaaagcattacaaaaaaatgtattacgcgtaacaaactcatcttcttctggcataagtgaaaaacatttagatcactgtgctaatactgtgaaaaactttttaaggaagtctatagcagcgcaaagttatagcaaaatgttttctcaagggaccagtttcaaatcactaaatctttctattgaagcgccatctggagcacggtcatcatttcggtcacttgagcatctcgataaggtgtccaggcactatatctctgagataatacaaaaagttcatcctctttcttcagacgaacgtcacttactttctattattattaattctaattttaacttcagacatcaaagtaactctaatctgtcaaataatattcttaatattaaatcctttgataaaattcagtctgaaaatatacaaacacataagaatacatactctgaggatattaaagaaatctctaaccacgattttgttttttttggggtcgaaatttccaatcatcaagaaaaactcccactaaataaaacacatcatactgtagattttggcgccaatgcgtatatcattgatcatgactctccatatggatatatgacattaaccgatcactttgataatgctattccacctgttttttaccatgagcaccaatcttttttcttagataactttaaagaggttgtggatgaagttagcaggtatgtgcatggtaatcaggggaaaactgatgttccaatatttaacactaaagatatgaggcttggaattgggttgcatcttattgattttataagaaagagtaaagatcaaggattcagagagttttgttataacaaaaatattgatcctgttagtctggatagaattataaactttgtgtttcagcttgagtatcatataccaagaatgctaagtacagataacttcaaaaaataaaactcagagacatatctttggaggatgcgattaaagcatctaatt

SEQ ID NO: 18 - DNA, 3349 bp, Photorhabdus luminescens
cggcttaatgcgtataattggcattatgtcttgcgcccccgcgggtcagcattggcgggtgtggcgcacaaggctgcgccttatgctctaaccgactgagccggacatcggcaactctgagttcttctttagctgccgtgccaacgtccggccaacaaccctgaaggcagatcggcctgcggcctccgctcattgacttccccccgccccaaccccgctgcactggctgcgcccggttcgcagtcgcaggctccttgctcattcccgtgctcgccatcgccgccccgtgcagcccccgggggcttccctgaacaaaacaaaaccgcgtggtcatgcaaggtcatacgcaaaccgaagccacagtgcctcagagcgtcgcaggggcgccgcttgcgggctctgtgccgcccgcgcccgcagaacgggcacccgccgcccaagcgagttgggcgacgttcgcccgttgccgaaaaaggcgctacactgaccagagcgcggcgggaaaaaccggccttcgggggcgaaaagcgcgtcagggggttttggggccggcggtgaacgcccattggaaaaaacgggtggtaactggctgagggcattgggaaaatcggtgtttggcggtcaacgtcgcaatggaatgggttgttgcggataataatgccctgagcttacccaaaggcatggcggattatggtcggtcagcatcaagtctggctaccgctatgttaaatgaaggtaaatcccctcaagagatttcagcggcattgtcaaaacatgccaaaggcgatcacccggaaggacaagatccggcaagaggattattagtcgcttggggggcaggtgcttctgctgtgggaggtactataattgcgcctgttgctgggaccgcagccgtagtgggtggagctttacttggtgcaatatccgataccggaaaacagcttatcactatgaaaccaaacgagagttacagctataccgacacccttatagctgccggagtgggagcattaacccaaggtaaaggtttgatatatacagaaggggtaaatattggtggagcctggctgggtagcaagcttaaaggtgaagatgcaactggagctgttataggtgcggctgttggtactgtagcaggtgctaaaggtggaaaaataattacagataaactggctcctgtcgttatcagtcctgtagcgtcagaaataggtggtgctatcggaggtactgttgtaggtacagtaataggcactggtattgaaaaccagataaaagaaaatggagctaaaaatggaaaataaacgaataggattaaaagcttttatcctacttacagcttactggacatcgtttatttttcttttggcctttattgcagggttagctgtacctgcattttattattttgaaaatggttattttaattatcattggaatgattttatttacactgcgagagtaggagttggtgcaggattgcctgttggaattggaatttgggtattggcgaagatagaagaaattcgcaaaagaaaatcctcttcagatccttagctacttaattccggccaatataatcgcaagtctggatacagcttgttgcggataataatgccctagctataccaatgccaccaccaccgatagccggttcaaacacgggtgaagccgtgaatgaagcaaaccagacaatagcttcagctttggacaaaaaattgaaggaaatgggagagtctatagataaagccacccaatgttcttttggccgggtatgttcgtcagattatgtcgataatgaaagccaaccaaatgtagggaagaatctgacaaatgaagaaaagtctcagtatggtggagttggttctggatcacctagtggttgggaaccacaggatgaggagaatgcgagaactcagcaatctgattccaaaaattttgatgataagtttaaaaagagtgatttagtatcttctgctaataagcctattaataatcaaggattatctgctggggctcgtgcttgggaaaaacacgcaggaagaccaggaggaatatttgagccgttaaaaggaaatgttactcagaaaaatgaagcagctagccggttcgtaaatgaagtgttgaataataagaatactgtccgaaccgatttatccaagggtggtatagaataccgtctacctgatggtagaggtgtccgctacaactcagatggttctttctcaggttttttagatcctaaaaggtaaaaaaatggctaataattttgaagtggatttttttagtgactccagatacgaagagctgacagcagaaatttcgtatagggggcaaatactttgtcaacttaacaaagacaagggaattgattctattgagattgaatttttttcagatagtaggattttggaaaaaccaatagaaatgaaattcccgttagacgagtttataaatgtgttgatgaatacaaaagtagatctcattacatgattaaaatctcggtttttaagttgggattttacttttaattatcggtttagagggggcctcatctagatgattggttcctccatccgcgatgaccgagaccaactaatcggtggtaaaagtcgcgtcggggcattatgagccggacatcgaactaccccgggaaaaatcgtttgtaaccgattgagtacattggagtaattggtgtccggcggtcaacttcgcaatggaatgggttgttattgagaataactatctgagcgtgaatgagctggacagttttgcgcatcaagcccgcacctgtgaaggcgaaagctgcaaacaagtgatcaaggatatggtagacactaatatccgcaatcagcaggaaatgatggatttctgcaacagcaacccgacccagtgtgcacagaagtatggttatctggttgatcagtggccggtgtttgaacgtaccctcaaaaatatggaccgggatggcacattgccggttgagttcagaaattacctgtcggcggtgaatacgttaggtcaggcggccacaggcaaggtaggcgaactcggctggacaaaacgctttgaggcgatgggcatgagcaaggaaacggccgctgcgatggcgatgacattgccaattgtgatggagggggctaaagggccgaagtcatcgccaacaacaaagggaagcacaggcgcggctgttaatacagagaaaacggcgctggaaaagattgggaaaaacagtcaaggcacaacgaatctgggtgataaatcggataatactgtttatcatcaacagcttatcaaaaatgctgaaaagatatctactgcgaaaccaggacaacaagttgctgcgccaagg

SEQ ID NO: 19 - DNA, 7204 bp, Photorhabdus luminescens
  misc_feature (7187)..(7187): n is a, c, g, or t
cgcctgatactgacatatttttgtcgtatttacgtccataatcggttattgtgatacaggtcacaccagcttatttgctattgttacaataaccaccttggttgagagctgttttttcaactttgttatcaactcccccaactccttggtcagtaaggctgccgaccgagcacagtgaatagatagtatccgcaggtaccaccatgcttacttaatactcagaaggcgaagtgctctccaattaactctgccgcactatgcttataagctgcttttcaatgccgtctatcaacatgtccagttcattcaatctgttgtactggtaatccaacgcagtaatgatatatgcaggtattctttcatccactccagtaacgtttcatgcaaagcattaatttacgcgctacggaacttcaccagttgactgagcaaacgatgtgggaccagtactgcctgcagttcttctattgttacagcgatttctttaccaaacagctgagccaccatcaagataaagatagcctgaacattcatcgcaccattttgttaccaatggcaaaagatttaacgaaccgtgcctgcatcaggcggactttttatccctgctttgttagctccctaaccttgtacagagagcctccataagctcccatatcaagcagacatggttcgcagttactgacatacaccagaaaactctgacagcagactcacttatcctccacttcactcatatccttattggtgagatgaacctgaatgacatgttttgcgacataaacgccaaccagtgtatatttcacctgtagagattctacaatctgtagcgttatgcatctaatgttaggctctatgatgtcagaaatctgcgagactctacaccttctgcatttacctttatttatcaccatgctcctcagttaacggagaacgtgttcattgcattttgtcacttacatttcgcctttggtatcggggggatataggttccaacgttccgcatgagaacctgaaccggcttcacgccaccttgataccagatgccgcacaggtagtcaacaagtgtcacgaacggtgcaatagtgatccacacccaacgcctgaaatcagatccagggggtaatctgctctcctgattcaggagagcttatggtcacttttgagacagttatggaaattaaaatcctgcacaagcagggaatgagtagccggacgattgccagagaactggggctctcccgcaataccgttaaacgttatttgcaggcaaaatctgagccgccaaaatatacgccgcgacctgctgttgcttcactcctggatgaataccgggattatattcgtcaacgcatcgccgatgctcatccttacaaaatcccggcaacggtaatcgctcgcgagatcagagaccagggatatcgtggcggaatgaccattctcagggcattcattcgttctctctcggttcctcaggagcaggagcctgccgttcggttcgaaactgaacccggacgacagatgcaggttgactggggcactatgcgtaatggtcgctcaccgcttcacgtgttcgttgctgttcccggatacagccgaatgttgtacatcgaattcactgacaatatgcgttatgacacgctggagacctgccatcgtaatgcgttccgcttctttggtggtgtgccgcgcgaagtgttgtatgacaatatgaaaactgtggttctgcaacgtgacgcatatcagaccggtcagcaccggttccatccttcgctgtggcagttcggcaaggagatgggcttctctccccgactgtgtcgccccttcagggcacagactaaaggtaaggtggaacggatggtgcagtacacccgtaacagtttttacatcccactaatgactcgcctgcgcccgatggggagcactgtcgatgttgaaacagccaaccgccacggtctgcgctggctgcacgatgtcgctaaccaacgaaagcatgaaacaatccaggcccgtccctgtgatcgctggctcgaagagcagcagtccatgctggcactgcctccggagaaaaaagagtatgacgtgcatcctggtgaaaatctggtgagcttcgacaaccccgttactttattcgtaccccttataatggggtgttagccagccagacccggcatgattactgcccccagtcgtccatgatccggggggtgatatcaccgggtctggtggggcgctggtaaccgctaataggggtcaggtcaggcacttttgccgggaccgtctgtaacgtggatgccggtacctgctctccgtggttatctggttaacccatatacaagggagacagaatgaccgaatccagcgattgcgaatccgtccaggtctttatcggcgttgatgtcggtaaagatacgcatcacgctgttgccattaatcgttcaggtaaacgcctgttcgataaagcattacccaacgacgaaaacaaactcaggtcgctaatatctgacctgaaacaacatggtcagatactgctggttgttgatcagccagctaccatcggtgcgttacctgtcgccgttgcccgctcagaaggagtccttgtcggatacctccctggactggccatgcgccgcatagccgacttacacgccggtgaagctaaaactgatgctcgtgacgctgccatcattgccgaagctgcccgtaccctgcctcacgcgctacgcacgctgaaactggctgacgagcaaatcgccgaactctccatgctctgcggcttcgatgatgatcttgccgcacagacaacgcaggccagcaaccgtatccgcggccttctgacccagatacatccggcaccggagcgcgttctcggtccgagacttgagcacccggcggtactcgatcttctccagcgatatccctcaccagaaaaactcgcttcgctgggtgagaagaagctggcagcccagctctgcaaacttgcgcctcgtctgggtaaacgccttgcagcagacatagctcaggcactggccgaacaaaccgtcgtcgttcccggcacgaatgccgctgccgtagtactgccacgtctggcactccagctcatcacgctgcgtaagcaaagagacgaggtggcgcttgaggtagaacagcgagttcttgctcaccctctttacccggtcctgaccagtatgcccggagtcggtgtcaggaccgcagccagactcctcaccgaggtcgcctgccgcgccttcgcctctgccgcacatctcgctgcttatgctggccttgcgccggtaactcggcgatccggctcgtcaatacgcggtgagcatccctcgcgacggggtaataaagctctcaaacgggcgttgttcctgtcggccttcgccgcgctcagggatccgctctccagggcttactacacccgcaaaatgagtcagggaaaacgacacaatcaggcgcttatcgccctggcgagacgacgctgcgacgttctgttcgccatgatgcgcgacgggactttttataccccgcaggggtcataacatgcttgacaacttaataggggccccccccctaagctgctgtctcttgatcagagctcctgatcaagagacttcatcaccaggtaaccctcaaccatatcctgaagtctgaccagccatcccacatgacgccccaaccgggacgacctgtgcgtttgctgtcatgccatcgccccaggcccatttcagggtcggtgcctgcaccggaagcggctttccttccagcttaacccacagtagtttccactctgtcggcgtcagtattttctcacagctgtcattttgtgtttcttcactgacacctccctgccgcaggcccagcacccgtaccgctataaacgcctggataaccaccatgcgctcaaggttatcccgggtctgcattcgcagcgattccatgtaccaccacttttccacgccttgtggtattcctctgtcagccagcgtcgctcgtaatggctgacaatacgtcgtgcatcggcggcactcgccgcttttcctgacgtcagcagatgccagcaggcaccgtcctctgcctgctcccggcaacagacatacgtgagcgggagcgcctggccgctgttgtcgggattttttatgctgacttcgctgtaactgatgaacatccgggcctgacgggctgcccgcccgcctttttgcatcacattcagcgtgtggcttcctgcggttgccaggacttccggcagttcgaagagcttgccgggtgcctcttccagccggcgattctgtgcagcacgcaccacgctgtccgtggctgactttataatacaggtaatgccagatatccgcttcccggtcacagacagtgattacccgtttctgtatctcccccagccgttcggccatgcgctccgaagcctgctgccagagtggagcgtgatgctccggcacggtctgccagccgtatgcagccgaacagagacggtgcgatgctacctgttgctcattactgtagatccgcagttcatcatccagcgagatccgtattgataccagctgaccacacaggctttccggcacactgtaacggttcccgccaacctcgatatagccatcctaggagacatgacggatatcgaagtccgtacccagcagcggctgcagatgctcctgttcctgcgtgaagcgctgttccggtgtctgcctgaactggcgaagttcccgcctgtcggcaacgtcagccatccactgcgcagcatgagagtttcctttgtggtgtaggaaccttaaggaaacaacatgttgggtggagcggacaatccaaatggtgaaggggggatgcggatgatttcctggactgctttatcattccagcccgcattgttggcggtacattttggggctgacggcacccagcgataatgcccacctctgtcactgtgtatcaccggtcgttcgccagcatttaacgtttcgacagcgctatccagcatagtgttgaccagttcagcatcagggcgtgtactgagagaccagctcacaacttttccatcgaagcagtccaccactggtgacagccagactttacctgcagggagctggaactccgtgatatctgtcagctatttctgattaggttgctccgccttaaaatctctggcgataaggttatccggagccggtccgatttctccgcaatatgagctgtagcgacgacgacggttacgactgacgacaagctgttcctccaccataagtctgcgtacaaccttttctgatagccgccccccctcatgcctgagcatcgcatgcaggcgacgatagccataacactggtaattactgttaaagatatctgtcagcatcttacgtatcgtggcgtatttatcaccggctttcagtgcagcccggtgataaaaataactgctacgggcaaggcccagaactgaggtgtactggcaatagcggacaccaccatttgttctttttctaagcagtcatctgataatattttatcctgaaggctgccggggagatattccccagacgagagtgacgacgctgacgattgtagaaaatctcaatgtattcccgtattactgagatggcctcatcccggctcttaaaacgatagtggctcaggctttcatttttcagcgttccccagaagctttccatcggagcgttgtcgtaacagttacctttacgcgacattgatgttttcagaccagactgctcctgtatgaccctgtaatcgtatgcgcagtactgtgaacctcgatcggtgtggtggattagcccggcaggtaggcgctggctcctgagcgccataaacagggctttacccgtcaactctttcatcatgcgctctcccatggcgtaaccgacaatttcgcacgtataaacatctttgacgccggcgagatacagccatccttcccgggtggcaacatacgttatatctgcgacccagacctgattaggtgctgtgggcgtaaagttctgattcagcagattcggcgtaaccggcagattgtggtcagagtttgtggtcgccctgaacttgcgtttctgcttacagtgcagcctcagctccttacgaagacgtgccagtctgtcacgaccgacgataattccgttatctgccagctccgtctggagccgccgggttccatatgtttcgcgagtgcggatatacaccaggtacccgacacatcgcttcaacagggaattgttgtcgccattgttcgactaacgcgtatttttcagcgactcctgtgcaaaatacggtggtgcttttttttaatatatctcgctcaagtcgtgcttcatttaaagccttacgcagttgcataacttcagattccagctcagccactgtgcgggagcctggtgtattgagcccttttcttgcggcggtaacccattgtcctaaagtgccttcaggaacagataatcgggaagcgccttcactgatcgaaagctgattttcaggaaccgttttgacggcttcggctttaaactccgtagagtaacgttgggtttttctgctcattattggctccttctgatgccattctatttcaggaaggagtgtccgttaaactcaggctacctcactcccgtaaagacaggagtcaagttcccgctccgacataactgcgtgcaatggattttgaaggaaccgtcagcccattccccggaggcaaacatgggctggcaaaagtgtagcggtattaggcacagctatttaggaaagagggaccatctccatctcattaaatggaccacgccagacaattcactgtcatgctgatgctgcactgtggggacagaatcactcatgatgacttcgataatcgacgacattattatttggccgagcttttaggtcatatctcaaatcgtttgcctaatattgctccattttttaataaaaaatcaatcatttttgaatctttgcttttcattgcattgtcaagcatagtgtccccactatttgctttttgaaattttttgtttacatcaaccaatccattattgataaaatattctagcacttttatagttggcaccatctttactaagtaagtattcaacatcatacagattacaatatctattggttttcattttctccatctctgcgacatcttgtttttgtaaattaaatttagatagtanataaagtgctatatcaa

SEQ ID NO: 20 - DNA, 3871 bp, Photorhabdus luminescens
attgtccactataatttagtggataataaagtaaaaatcctaactcaagactgggattctgtactaattgtaagactgttataaaaatctataatgctatttagatcagtattccattcagatattttcattccgtcttcattgtgcgtagtacgcgactctataaagttatttatcttctctggagtaaaacctggacactcatccaaaaagaggatgctattttgcaagaaaacttcctcacctgcgaaatatatgacccaaacaaatataaaatttgtgtaatcaggctcatacattgatacagctagcgccacaggctttttactgtgtataccctcctcaagagaaactcgccaactccgcttgtaatcctcaaagctccaataagataaaggtatgtgaactgcttctgtaaatgtatcaataataattgttgcaggcagaactagctcatcgttttctctgatgggtgcatcaccgggaaatataccaaacatcaatcagtccttaactctgttcagatcactatcgtaagtccccattcgcttgcctctacggtcaaacattttccaaccattagtaacattatgactatcaacatcgggagtaatataggttttaccatcaaaaaatacaggttgcccatgtgagttaaatggtgctttaggaggagctattctccgatcaaagcctaatttccctgctgcttcttgggcttcttttcctttcagagccagataggctaagtcgtctttatttggctctcccagaatcggagtagttgtggtcttcccgccagtatccggcttaccttccgtattaccggtatgattagggtatttcctcagccaaagttggtccggtcatcaatcagatggtggcgtcttaattctcacgacttcctttcaaacgggataagatccaaattcctattccagtcggtatacctgttactacccctttttttactgaaaaaacaacatcatcatgccaactaaagatgaatgtttcgtttttcaaataaactaaaatcgcagcacataggcatcctaataagaccaccataatcataataattgtgcataataacagaagaatcagtaatgacttaaaatgagttatcatttcgctcctcctgatttatccagcttatcctcaactttactgcctgtaacttcactggctatagcaccaccaatagctccgatagtacttgacgttttattcgatactatagggaaatatttatttccaacgtcgattacttttcctccagcagtacctacaacattaccaactgctgcacctactaccggggcaagtggatttttatcctgtagttttgccccaacataagcacccgttatactcgcgacttctgtaaaccaaaaccctttgccttgcgttaatgcccctgttcctgtggctatcagtgcatcagtaatgttcacaggaccatttgtcaattgattactgacattagctgttccactgattagacctccagcaaaaatactgcctaccgttgctcccgatggcagcagcaccggtgccactactgtggacattcccgctccccaagcgactaacaatcctcttaccggatcttgtccttccgggtgatcacctttggcatgttttgacaacgccgctgaaatctcttgaggggatttaccttcatttagcatagcggtacccagacttgatgctgaccgaccgtaatccgccatcccttttggcaagctcagtgcattattgtcagtaacaacgcattccattgcgacgttgaccgccgaccttaaattttctcagtgcattcagttagttaaaagcaacttttcccggtatggttcgatgtccagcccacaacgccccgacgcgacttttcagcctgataagccacttttcccagacgtaatgaactaccccttttaaatgtcggatgattgtttaacatttggggtagttcattttggccgggatttatgtttctaacatcaataattagataattttttaattacagaacttacagtaccagatggtaataatgtttcatttattgtttttccatcatcattactccatacaaaacgatcattatggctcgttttcatgaagtaaacataatatccattatctcccattggtgtacatgtcatatcgaacagcccctcaatgagattttctccatcccctgtgaaatagctctcagcatttctatacaggctaactggtccaatgttgacatcattacataccaattcatctattttcatatttgaataaaaactgaaggttgttttcagctcaaaaacatccaaaagatcaaatattttatgtccatccaaatagaaaaagaagatgccatttttccaaaagccatcagatgagttccatgattcaacagcatcgaactgaagagaaaaataaaacggatcgccataaatcatttcaacctaactcccaatttcttttgaatgtcgcttggaacctgtttacttgttaactggttttttatatctccagagctgccattccagtgatattccccattggtcccttcgaaccgatgaacattacctttttcatccttagcaaatctaacttctttattaccataatttttggagcttggaattgaattttcaaaaagtttcaatgagtcttttggttctattcccgcattacggcgatttccatcaccaccaagagtatgtttaggatttgatttataaactaacccattattcgctgtcactggattaggtactggtacagcacttcccttgactccttttgctccagccttactgatccctccagcaatccccgcagacgccgcaattcccgtctgccccataatcttcacgatttcctgggtagtttcttctgagccgccggagtactaaattgcgggacgcatcaatatttgacatggcaccgcgtaaatctgcccattcccgcacttctgccggtgtgagggaatccagaccctgcattctggctttttcctgaatttcactcatccgggcgctgtaatcaccttgcaatgcccgcagctctttggcaaccgcaacgcactggtcagccccggaacacgttgctatccgctcctgaaccttgtcatactcctgccgatatttatccctaatggcagaacggcaactgctatcaccctgacaattaaccagttcctcactgcgcgattggttcttctccacacttaggtggttgttgtctacaacaacccattccattgcgacgttgaccgccaaacaccgattttcccaatgccctcagccagttaccacccgttttttccaatgggcgttcaccgccggacccaaaaccccctgacgcgcttttcgcccccgaaggccggtttttcccgccgcactctggtcagtgtagcgccttcttcggcaacgggcgaacgtcgcccaactcgcttgggcggcgggtgcccgttctgcgggcgcgggcggcacagagcccgcaagcggcgcccctgcgacgctctgaggcactgtggcttcggtttgcgtatgaccttgcatgaccacgcggttttgttttgttcagggaagcccccgggggctgcacggggcggcgatggcgagcacgggaatgagcaaggagcctgcgactgcgaaccgggcgcagccagtgcagcggggttggggcggggggaagtcaatgagcggaggccgcaggccgatctgccttcagggttgttggccggacgttggcacggcagctaaagaagaacacgggtttttgccgaggactggctcagccgctgatagcagaaggcgtcagccttgtgcgccacacctgccaatgctgacccgcgggggcgcaagac

SEQ ID NO: 21 - DNA, 2299 bp, Photorhabdus luminescens
gatctttattcatacctaacaatttacttccttgtgacggatttgattcaacctgtttccagaaagtttgctcattcagatcccttggcgcagcaacttgttgtcctggtttcgcagtagatatcttttcagcatttttgataagctgttgatgataaacagtattatccgatttatcacccagattcgttgtgccttgactgtttttcccaatcttttccagcgccgttttctctgtattaacagccgcgcctgtgcttccctttgttgttggcgatgacttcggccctttagccccctccatcacaattggcaatgtcatcgccatcgcagcggccgtttccttgctcatgcccatcgcctcaaagcgttttgtccagccgagttcgcctaccttgcctgtggccgcctgacctaacgtattcaccgccgacaggtaatttctgaactcaaccggcaatgtgccatcccggtccatatttttgagggtacgttcaaacaccggccactgatcaaccagataaccatacttctgtgcacactgggtcgggttgctgttgcagaaatccatcatttcctgctgattgcggatattagtgtctaccatatccttgatcacttgtttgcagctttcgccttcacaggtgcgggcttgatgcgcaaaactgtccagctcattcacgctcagatagttattctcaataacaacgcattatcacttagtgaacaatgggttgttgcttataattgcgtaaatttcatctgttattgggtctatatcttccccatattggcctctatcccccatcattctgaaatcattcataatatatttgtataaattcttcataccattacttgctttgttctcaagaatattaatggattttattaagtatgcataagatgactctccatttcctgattcttttaaatacgtaacaacttgtttcaataaggatattaatcttgcgatttctatcatatcttcatttgttgacattttattttcctttatttgttatttgatctggaaatgttttcttaaattcttcgtaagtgtaaacattacctgtttttccatctcgtattgatttaatccaatccataggataattccgtggcagtagaatttgatcagctccacctatgtatttaggattattactcaaaggtggttgttccccaacagaaccaatgtttagcttagtatttttgggtacttctatctcagcctcaaatcgagttgtactccagtttttatagacggcagtttcgtttctgcccgcattttgtgtggttgttgcgtaaccaccatctaatttggcttgatcattaacaccaccaaattttctaaataatgttacaggttcttgtgtaataacagtttcatattttccagccttaaatgtcgaggacacacttgtaggtaaatgttccttatctactataactatactcttatctattttcgttcctagtgaagctttggaattaacatttgtatgcgagatgtttttatcagcaccaagggctatttctccaattttcgctgtctgtgctttttctttcatcaaattatcaatcgttgaactattttttctatcaacagcttctatcgattgatatttactcaaagacagatatgctttcgcggctgcaaactgtatcagctttgcttcactggtaggtatccctccggcaacaatttccgccgctttctgtggcgtcatctgctcatttgataacacgacatccaacggaacaccaaagaaattaccccacgcaataatcaaaccttttgctgggtcctgaccatcagggacttgcccttttagatagtgagttaaggctgcgttgatttcttcggatgttgccccagattgggccattttttgagccagtgaacccgcaccttcaaaatgtttagcgccttcggcaccaaacagacttcccatgctaagggcattattatccgcaacaacccattccattgcgaagttgaccgccaaacaccgattttcccaatgccctcagccagttaccacccgttttttccaatgggcgttcaccgccggacccaaaaccccctgacgcgcttttcgcccccgaaggccggtttttcccgccgcactctggtcagtgtagcgccttcttcggcaacgggcgaacgtcgcccaactcgcttgggcggcgggtgcccgttctgcgggcgcgggcggcacagagcccgcaagcggcgcccctgcgaggctctgaggcactgtggcttcggtttgcgtatgaccttgcatgacca

SEQ ID NO: 22 - DNA, 5675 bp, Photorhabdus luminescens
catatcggcactgacattcaacgctaatgcaatccgccgaaacacatcaatcgtcggctgggatgtcccggcttcatagcgcttgtattgtgaaacgtgcataccaatcttgtcagccatctgttgttgcgtgaaaccaagctctttacgggaagccgccaatttatcagaaaagctcataggaaattccaaagttgctgtaactgacgtcactatacccctcccgtttttatcgcttgactaaaagtatcatatcagggactatatatattatcaatatgaatcttgacgcattttacaggagtagaggcaatgacccgcgttcccgataccgatttagcccgcttaaagcaaaccgtctcgttactggggctggcgcgtaagcaaggccgtccgatgaaaaaacgcggtgaggattatgtgctgcgctgtccgttccataacgagaaaacgccctcaatggtgatatcgcctgctaagaacctgtatcactgctttggctgtggcgcagcggggtcggtgctggactgggtgatacaaacggaaggggtgacgctgaaaatcgctatccgccggctgcgggagctggccgggttgccggatatggacaatgcagttgtggccgcttcttctttagccgccccgccggagtcacaggcggcacccctgccgcgcccgaaactggccgacctggacgatgacgggcaggcgctgttgcatcaggtgattgatttttatcatcagcacttactggcgtcaccggaagccaaagcctggctggcacgacgcgggctgaatcatcctgaactggtcagccacttccggctcggttatgcgggtcatcacggtatcagcggttccgcgggattgttgccgtccaaagacagtcaggaaggccagcagttgcgcggcaagctgtcggggctgggcgtgttgcgtaccaccacccggcaggaccacttccggggctgtgtcgtggtgccgataatcggctgggccgaatcggccagtgtggccagccgcgggcgggtgctgcaactgtatggccgccgaacccagccggattacaaagtgctgaaagacagcccaaagcatctgtacctgtcctcacccctggccggggtctggaatgaggcagcgatgaaagccgctgcggaaattatcctgtgcgaagcgctgatcgatgccatgaccttctggtgtgccgggttccgtaacgtgattgccgcgttcggggtgaacgggtttaaccgtgagcacctcgaagccttgcagtatcacggcgtgaaacgggtgctgattgcctttgaccgggacgaggccggagaccgtggcgcggctaatgtggcggctgacttactggaagccggtatcgaggcatggcgggtgcagttcccgccgggcatggatgccaatgactatgccgtcaaaagcggcaacgccgaacatgcactggggctggcgttgcaacaggcggtctggctgggacagggaacggcaccgggcgcggtgttcagccatgagcggcccgtctcgccgggtgtgacggaaaagcctcacaatgctgatgtggctaaaccggctgctttagccgccccgccggcgctgaccgttgcccccgtgccctgtgagcgtacggcgtccggtgagttgttgatgaaaagcggcccccgggtctggcggatacgagggatgaaaaaatcgccggtgcccgatgtgatgaaagtcaatgtgcaggtccgtgatgaaacgtccggcctgttccatgtggatacgctggacatgtatcacgcgcggcatcgtcagaactacatcagcacggcggcgcaagagctggaatgcgagctgtcggtcatcaaacgcgaagccgggcgggtattgctgatgctggagcagcaacaggacgcgcaacagcaagccgacgccgaagcctcagggacaacggcggtcacggtcagcgcggaagacgaagccgccgcgctggcattgctgacatcaccgaacttaacagaacagattatcaacgacatggccgcctgcggggtggtcggcgaatcgaccaatctgctgaccgggtatctggcggcagtctcgcgcaaactcgataaaccgctggccgtgttaatccagagcagcagcgcggcaggcaagagcagcctgatggatgccgtgctgaacctgatgccggaagaggagcgtatccagtactcggcaatgaccggacagagcctgtattacctcggcgaaaccagcctgcaacacaaaatactggcgatagccgaagaggaaggcgtgcggcaggcggcttatgccctgaaactgttgcagtccgacggcgagctgaaaatcgccagcaccggcaagaacgagcagagcggcgaactggtgacgcgggaatacaaggtacagggaccggtgatgctgatgttaacgacgacggccattgatgtggatgaagagctgctgaaccgctgtctggtgctgacggtcaacgaatcgcgcgagcagacgcaggctatccacgccatgcagcgacaccgccagacgctggccgggttgctggctgactcggagaaaggctatctgacgcagttacaccagaacgcccagcgcctgttaaggccgctgaaagtggtcaatccttacgcccaccaactgacgttcctgtcagacaaaacccggatgcggcgcgaccacatgaaatacctgacgctgatacaggccattgccctgctgcaccagtatcaacgtgaagtgaagaaaacgacccaccgcgggcaggtcatcgaatatatcgaagtcacccaggacgacattgccctcgccaaccggctggcgcatgaggtgctggggcgcacgctggatgaaatgccgccgcagacgcgcaagctgttgctgctgatacaggactgggtacgggaaaccgccggacaacaggcggtcagggtcgatgaactgcattttacccggcgggatattcggaccgctttgcactggggtgatacgcaactgaaagtacatctggcgcggttgctggaaatggaatacctgttgctgcatcgccgcgggctgacctatgaatatacgctgttgtgggatggtgaagataccgggcaaccgcatctgtgcgggttactggagatgactgaatcccggtcagaaacggcaggcaatgtgtttcagtcggggtcagaggatgttcagtcgggcacgggtcggggcagggtcggcagtcagtcggtaaatcagaatccggcctcaaggcaggcaacatcagacctgtcggcggaagtggccggggtaaagcaaaaagcagttattaagacagaaaaaaaaccggcttcaatccccctgcccgaagaaacagaaatgacgaatgacgctgttgcgggcaaggcgttccggtcggggtcagagggtgttcagtcgggtacaggtcggccccaggtcggtacacagccggacagacaaaatccggcctcagcacagacagcacaaggtttaacaacagaaccgggcggggccggaaagaaaacggttaacagacataaaacgcaaaaggccccaccgcccgctgcctcagccgcccatccccaatccgaaacggaggttaatcatggcaaaccgtaaaccccgcaaggggagtcttctgaccgttaatgacgtctaccgtcagcctgtggggccggcgcatgacccgaaaagcctgtatgcactgctgctgcgcttcgtggcctggcggcaggaacggaactggtcggaaaccacgctgaaagtgcagacccatcacacctatcactttatcctgtgggccacggaccggggcctgtactatgccgcggacatcacgcggccgatactggagcgttaccagcgctacctgtaccagtaccgaaagaccaacggagagccgctgagcatccgcacccagcgcacgcagttgcagccgttacaggtgtggttcaaatggctgacgaaacagaacctgatactggcgaacccggcagcggacattgagttgccgcgggaagaaaaacgcctgccgcggtatatcctgagcattgatgaaatcgagcatatcctgtcgctgcctgacccgaatacgttgcagggcgcgcgcgaccgggccctgatggagctgctctggtcaacggggatacgacgcagtgaagcggcccggctcgatatctacagcattgacgggtcacgcaaaacggtgaccatccggcagggcaaggggaataaagaccgggtattgcccctcggcgaacgggccttaaactggctccagttctatcagcaacaggttcgcccgcaactgctggtcaccccggacatccaatcgctgttcgtggcaatggacggtctcgacgggttgcagccgaacggtatcacgaatgccgtaagcggttatatccgggccgccggcattgagaaaaaaggtgcctgccacctgttccggcatgcgatggcaacgcagatgctggagaacggcgcggacctgcgctggatacaggccatgttaggccatgccagcgtggagtcaacccaggtgtatacgcaggtctctatccgggccttgcaggcggtgcacgccagcacccatccggcggagcaaatggccgacgaaaaagtccgcgacgccgatgaggtgggtttactggccgacctgtacgccgacgataacgccgacacggacacgccgccggacagttcagagccgacctcaaccgccgatagccgctgagcgtccgcacgcccccgttgagttgggcgggttcggtgtgggggcagaccgtggccggactgcccgtcggcatcggcgcacgcgggggtaaatagtcgtcaggcggctcaaccacgagcgtccccgttaagccggtccaggccgcccaacgcctattgaacataatgcgggggaattatacgcactgcgccggtgagcccgggcaaccgcctgagcattgatgagcggcttaatgcgtataattggcattatgtcttgcgcccccgcgggtcagcattggcgggtgtggcgcacaaggctgcgccttatgctctaaccgactgagccggacatcggcaactctgagttcttctttagctgccgtgccaacgtccggccaacaaccctgaaggcagatcggcctgcggcctccgctcattgacttccccccgccccaaccccgctgcactggctgcgcccggttcgcagtcgcaggctccttgctcattcccgtgctcgccatcgccgccccgtgcagcccctgtctcttgatcagatctccaaatcaactgatttagccagcaaatagccgtctatcagggtttgcagccgaaaccagccttcccaaagtcgttcccatccgactcgacccgtgcgtttggaatcgtaccagccggccagttttcccagattgatgaaggcccaatgcaaactcggggcttttttcggcacacggcgtttttcttgttttgaccacagtaatttccacgccagggggcttaatactgtctcacagctctctttctctgcctcttctttgttcagacccataaaacgcagctggtgtattcgtaccgcaataaaggccagcagcactatcatgcgctccagattatctttgctttgcatacgcagcgcttctacctgcgtgccgcccgttttccacgct

SEQ ID NO: 23 - DNA, 5187 bp, Photorhabdus luminescens
tccaactgtgagactgcttcgaactggagttttagccggtcatcgggtccgcgctcattgggatcaaaaagaagcatatcggcactgacattcaacgctaatgcaatccgccgaaacacatcaatcgtcggctgggatgtcccggcttcatagcgcttgtattgtgaaacgtgcataccaatcttgtcagccatctgttgttgcgtgaaaccaagctctttacgggaagccgccaatttatcagaaaagctcataggaaattccaaagttgctgtaactgacgtcactatacccctcccgtttttatcgcttgactaaaagtatcatatcagggactatatatattatcaatatgaatcttgacgcattttacaggagtagaggcaatgacccgcgttcccgataccgatttagcccgcttaaagcaaaccgtctcgttactggggctggcgcgtaagcaaggccgtccgatgaaaaaacgcggtgaggattatgtgctgcgctgtccgttccataacgagaaaacgccctcaatggtgatatcgcctgctaagaacctgtatcactgctttggctgtggcgcagcggggtcggtgctggactgggtgatacaaacggaaggggtgacgctgaaaatcgctatccgccggctgcgggagctggccgggttgccggatatggacaatgcagttgtggccgcttcttctttagccgccccgccggagtcctgtctttcctacacaaatattttaacccgcccccgcgttattgaacttttccctcatagattgatctcaataaaaaacacgacttgaggtaatctttatgttttcaaccagcgccgaacaatgggcaaatgacacgtttcaacatgcggaattaggtgataaacgccgtaccaaccgcctggtgaaagtggcctgttcgttggctaaccatataggacaatcgctcgtgcaatctcttgactctcctgccgatgttgaagcggcctaccgactgacccgaaattccgccattgcgcctcaggccatcgccgaagccggatttaccgccaccgtcgctcacgctcaacgttatcattgcctgttagcgctggaagacacgacaaccctgtcattttcccatgcgtcggtcgccgatgaactcggctataccacctcaaaggaaaaatcccggggcatgcaggcacactcggtgttgttatttgcgcctgaagaacaacaggtcgtggggttgatagagcaacagcgctggtgtcgagatgtcagtgattatggcaaaagccgacaacgcgatacacgcccttatgaagggaaagagagttataagtgggaacgggcctcacaagccgtcgacagccggttaggggagcagatggccaacgtgatttctgtctgtgaccgtgaagccgatatcatcgaatatctgcgttataaaacgagccaaaaacaacgtttcgtcatccgttcgatgcaaaaccggcgtatagaggaaagtcaggataaactttatgactttattagccggttacagagtgctggagaacgattagttcaggtcagacagaaaggcgggcgtcaggcgcgtgtcgcgcattgtgatatcagttatgccgaagtgacgttgaaaatccccgaaggaaaaagcggtgaggcggtgcggatattttatgtcggttgctacgaaaaaggtccggaggatgggctttgctggcatcttctgacctccgaacccgtcaacagtcaggaagacgcccataaaatattcagttattacgagcgccgctggctgatagaagaatttcacaaagcgtggaaaacgggcggcacgcaggtagaagcgctgcgtatgcaaagcaaagataatctggagcgcatgatagtgctgctggcctttattgcggtacgaatacaccagctgcgttttatgggtctgaacaaagaagaggcagagaaagagagctgtgagacagtattaagccccctggcgtggaaattactgtggtcaaaacaagaaaaacgccgtgtgccgaaaaaagccccgagtttgcattgggccttcatcaatctgggaaaactggccggctggtacgattccaaacgcacgggtcgagtcggatgggaacgactttgggaaggctggtttcggctgcaaaccctgatagacggctatttgctggctaaatcagttgatttggagatctgatcaagagacaggccggagtcacaggcggcccccctgccgcgcccgaaactggccgatctggacgatgacgggcaggcgctgttgcatcaggtgattgatttttatcatcagaacttactggcgtcaccggaagccaaagcctggctggaaaaacgcgggctgcatcatcctgaactggtcagccacttccggctcggttatgcgggtcatcacggtatcagcggttccgcgggattgttgccgtccaaagacagtcaggaaggtcagcagttgcgcggcaagctgtcggggctgggcgtgttgcgtaccaccacccggcaggaccacttccggggctgcgtcgtggtgccgataatcggctgggccgaatcgaccagtgtggccagccgcgggcgggtgctgcaactgtatggtcgccgaacccagccggattacaaagtcctgaaagacagcccgaagcatctgtacctgtcctcaccgctagccggggtctggaatgaggcagcgatgaaagccgctgcggaaattatcctgtgcgaagcgctgatcgatgctatgaccttctggtgtgccgggttccgcaacgtgatcgccgcgttcggggtgaacgggtttaaccgtgagcatctcgaagccttgcagtatcacggcgtgaagcgggtgctgattgcctttgaccgggacgaggccggagaccgtggcgcggctaatgtagccgctgatttactggaagccggtatcgaggcgtggcgggtgcagttcccgccaggtatggatgccaatgactatgcgctgaaaagcggcaatgccgaacatgcgctggggctggccttgcaacaggcggtctggctgggacagggaacagcgccgggcgcggtgttcagccatgagcggcccgtctcgccgagtgtgacggaaaagccccaaagtgccggggtggctaaatcttcttctttagccgccccgccggcgctgaccgttgcccccgtgccctgtgagcgcacggcgtccggtgagttgttgatgaaaagcggcccccgggtctggcggatacgggggatgaaaaaatccccggtaccggacgtgatgaaagtcaatgtgcaggtgcgggatgaaacgtccggcctgttccatgtggatacgctggacatgtatcacgcgcggcatcgtcagaactacatcagcacggcggcgcaagagctggaatgcgagctgtcggtcatcaaacgcgaagccgggcgggtcttgctgatgctggagcagcaacaggacgcgcaacagcaagccgacgccgaagcctcagggacaacggcggtcacggtcagcgcggaagacgaagccgccgcgctggcgttgctgacatcgccgaacctgacagaacagattatcaacgacatggccgcctgtggcgtggtcggcgaatccaccaatctgctgaccgggtatctggcggcagtctcgcgcaaactcgataaaccgctggccgtgctgatacaaagcagttccgctgccgggaaatcgtcattgatggaggcggtgctgaacctgatgccggaagaggagcgtatccagtactcggcaatgaccgggcagagcctctactatctgggggaaaccagcctgcaacacaagatactggcgatagccgaagaagaaggcgtgcggcaggcggcttatgccctgaaactgttgcagtccgacggcgagctgaaaatcgccagcaccggcaagaacgaacagagcggcgaactggtgacgcgggaatacaaggtacagggcccggtgatgctgatgctgaccaccaccgccattgatgtggatgaagagctgctgaaccgctgtctggtgctgacggtcaacgaatcgcgcgagcagacgcaggccatccacgccatgcagcggcaccgccagacgctggccgggttgctggctgactcggaaaaaggctatctgacgcagttacaccagaacgcccagagcctgttaaggccgctgaaagtggtcaatccttacgcccatcaactgacgttcctgtcagacaaaacccggatgcggcgcgaccacatgaaatacctgacgctgatacaggccattgccctgctgcaccagtatcaacgtgaagtgaagaaaacgacccaccgcgggcaggtcatcgaatatatcgaagtcacccaggacgacattgccctcgccaaccggctggcgcatgaggtgctggggcgcacgctggatgaaatgccgccgcagacgcgcaagctgttgctgctgatacaggactgggtacgggaaaccgccggacaacaggcggtcaaggtcgatgaactgcattttacccggcgggatattcggaccgctttgcactggggtgatacgcaactgaaagtacatctggcgcggttgctggaaatggaatacctgttgctgcatcgccgcgggctgacctatgaatatacgctgttgtgggatggtgaagataccgggcaaccgcatctgtgcgggttactggagatgactgaatcccggtcagaaacggcaggcaatgtgtttcagtcggggtcagaggatgttcagtcgggcacgggtcggggcagggtcggcagtcagtcggtaaatcagaatccggcctcaaggcaggcaacatcagacctgtcggcggaagtggccggggtaaagcaaaaagcagttattaagacagaaaaaaaaccggcttcaatccccctgcccgaagaaacagaaatgacgaatgacgctgttgcgggcaaggcgttccggtcggggtcagagggtgttcagtcgggtacaggtcggccccaggtcggtacacagccggacagacaaaatccggcctcagcacagacagcacaaggtttaacaacagaaccgggcggggccggaaagaaaacggttaacagacataaaacgcaaaaggccccaccgcccgctgcctcagccgcccatccccaatccgaaacggaggtt

SEQ ID NO: 24 - DNA, 7682 bp, Photorhabdus luminescens
cgtgcggcaggcggcttatgccctgaaactgttgcagtccgacggcgagctgaaaatcgccagcaccggcaagaacgaacagagcggcgaactggtgacgcgggaatacaaggtacagggcccggtgatgctgatgctgaccaccaccgccattgatgtggatgaagagctgctgaaccgctgtctggtgctgacggtcaacgaatcgcgcgagcagacgcaggccatccacgccatgcagcggcaccgccagacgctggccgggttgctggctgactcggaaaaaggctatctgacgcagttacaccagaacgcccagagcctgttaaggccgctgaaagtggtcaatccttacgcccatcaactgacgttcctgtcagacaaaacccggatgcggcgcgaccacatgaaatacctgacgctgatacaggccattgccctgctgcaccagtatcaacgtgaagtgaagaaaacgacccaccgcgggcaggtcatcgaatatatcgaagtcacccaggacgacattgccctcgccaaccggctggcgcatgaggtgctggggcgcacgctggatgaaatgccgccgcagacgcgcaagctgttgctgctgatacaggactgggtacgggaaaccgccggacaacaggcggtcagggtcgatgaactgcattttacccggcgggatattcggaccgctttgcactggggtgatacgcaactgaaagtacatctggcgcggttgctggaaatggaatacctgttgctgcatcgccgcgggctgacctatgaatatacgctgttgtgggatggtgaagataccgggcaaccgcatctgtgcgggttactggagatgactgaatcccggtcagaaacggcaggcaatgtgtttcagtcggggtcagaggatgttcagtcgggcacgggtcggggcagggtcggcagtcagtcggtaaatcagaatccggcctcaaggcaggcaacatcagacctgtcggcggaagtggccggggtaaagcaaaaagcagttattaagacagaaaaaaaaccggcttcaatccccctgcccgaagaaacagaaatgacgaatgacgctgttgcgggcaaggcgttccggtcggggtcagagggtgttcagtcgggtacaggtcggccccaggtcggtacacagccggacagacaaaatccgggcggggccggaaagaaaacggttaacagacataaaacgcaaaaggccccaccgcccgctgcctcagccgcccatccccaatccgaaacggaggttaatcatggcaaaccgtaaaccccgcaaggggagtcttctgaccgttaatgacgtctaccgtcagcctgtggggccggcgcatgacccgaaaagcctgtatgcactgctgctgcgcttcgtggcctggcggcaggaacggaactggtcggaaaccacgctgaaagtgcagacccatcacacctatcactttatcctgtgggccacggaccggggcctgtactatgccgcggacatcacgcggccgatactggagcgttaccagcgctacctgtaccagtaccgaaagaccaacggagagccgctgagcatccgcacccagcgcacgcagttgcagccgttacaggtgtggttcaaatggctgacgaaacagaacctgatactggcgaacccggcagcggacattgagttgccgcgggaagaaaaacgcctgccgcggtatatcctgagcattgatgaaatcgagcatatcctgtcgctgcctgacccgaatacgttgcagggcgcgcgcgaccgggccctgatggagctgctctggtcaacggggatacgacgcagtgaagcggcccggctcgatatctacagcattgacgggtcacgcaaaacggtgaccatccggcagggcaaggggaataaagaccgggtattgcccctcggcgaacgggccttaaactggctccagttctatcagcaacaggttcgcccgcaactgctggtcaccccggacatccagtcgctgttcgtggcaatggacggtctcgacgggttgcagccgaacggtatcacgaatgccgtaagcggttatatccgggccgccggcattgagaaaaaaggtgcctgccacctgttccggcatgcgatggcaacgcagatgctggagaacggcgcggacctgcgctggatacaggccatgttaggccatgccagcgtggagtcaacccaggtgtatacgcaggtctctatccgggccttgcaggcggtgcacgccagcacccatccggcggagcaaatggccgacgaaaaagtccgcgacgccgatgaggtgggtttactggccgacctgtacgccgacgataacgccgacacggacacgccgccggacagttcagagccgacctcaaccgccgatagccgctgagcgtccgcacgcccccgttgagttgggcgggttcggtgtgggggcagaccgtggccggactgcccgtcggcatcggcgcacgcgggggtaaatagtcgtcaggcggctcaaccacgagcgtccccgttaagccggtccaggccgcccaacgcctattgaacataatgcgggggaattatacgcactgcgccggtgagcccgggcaaccgcctgagcattgatgagcggcttaatgcgtataattggcattatgtcttgcgcccccgcgggtcagcattggcaggtgtggcgcacaaggctgacgccttctgctatcagcggctgagccagtcctcggcaaaaacccgtgttcttctttagctgccgtgccaacgtccggccaacaaccctgaaggcagatcggcctgcggcctccgctcattgacttccccccgccccaaccccgctgcactggctgcgcccggttcgcagtcgcaggctccttgctcattcccgtgctcgccatcgccgccccgtgcagcccccgggggcttccctgaacaaaacaaaaccgcgtggtcatgcaaggtcatacgcaaaccgaagccacagtgcctcagagcgtcgcaggggcgccgcttgcgggctctgtgccgcccgcgcccgcagaacgggcacccgccgcccaagcgagttgggcgacgttcgcccgttgccgaagaaggcgctacactgaccagagtgcggcgggaaaaaccggccttcgggggcgaaaagcgcgtcagggggttttgggtccggcggtgaacgcccattggaaaaaacgggtggtaactggctgagggcattgggaaaatcggtgtttggcggtcaacttcgcaatggaatgggttgttattgagaataactatctgagcgtgaatgagctggacagttttgcgcatcaagcccgcacctgtgaaggcgaaagctgcaaacaagtgatcaaggatatggtagacactaatatccgcaatcagcaggaaatgatggatttctgcaacagcaacccgacccagtgtgcacagaagtatggttatctggttgatcagtggccggtgtttgaacgtaccctcaaaaatatggaccgggatggcacattgccggttgagttcagaaattacctgtcggcggtgaatacgttaggtcaggcggccacaggcaaggtaggcgaactcggctggacaaaacgctttgaggcgatgggcatgagcaaggaaacggccgctgcgatggcgatgacattgccaattgtgatggagggggctaaagggccgaagtcatcgccaacaacaaagggaagcacaggcgcggctgttaatacagagaaaacggcgctggaaaagattgggaaaaacagtcaaggcacaacgaatctgggtgataaatcggataatactgtttatcatcaacagcttatcaaaaatgctgaaaagatatctactgcgaaaccaggacaacaagttgctgcgccaagggatctgaatgagcaaactttctggaaacaggttgaatcaaatccgtcacaaggaagtaaattgttaggtatgaataaagatccccgttttcctacagcggctggttttcagaaaatggaagcaaaacataggctccctaatggacaaacaataactatccattaccagtacaactcaaatactggtaaagcctatgacatgaaaattactactcctcagagaatccaacaggatcctaaaaaggtaatagattcaataaaggataatgttaaatgaaaatacaagaatcagatggctctattgttgatgtttttgccatatattggtttggtgatgaaacatatttttatgggttaccaccaaattatggaggtttacaggcatataagtctcatgaagtctcagttatcgatacaacgatagattttaaaactgtttttttctcaaatgatgatgctaaaagtgttcatcattgggcattaatagaagaacagttgctggatgatctacttgagttagatgaaactgcttatcaacgctttttggcaatcctaaaggcagaaggtaatatagaacaggatttttgttaattaggcgtcccggtcagtggccgggagcttcctgcttttaaccgtcaactgttctcaacgagccggataatcaactgtccgtgctcaacactgacctgcactggctgcccggtcacaaagcccgcttcttccagccaattacctttaagatgcaagctgggatgctggctgtaatagcgggtcatgccagtgtggcggtcggcgtgacatcggctgatatagccgaccttatagcggcgttgcgctttcgaactgcctgaatttacattacaatcgcgttcagccatagctaactacctctgatagtgggttgtggttagcggtgctgggatgttctcagcatctcaacaccgcgtaagtattgtctcttcttgagcggctaacgttttaccgtccaacgtttagcatcatgcatatgcaacatactgctaatcactgtctcaatcgcttcccgctctttctcatccaactgtgagactgcttcgaactggagttttagccggtcatcgggtccgcgctcattgggatcaaaaagaagcatatcggcactgacattcaacgctaatgcaatccgccgaaacacatcaatcgtcggctgggatgtcccggcttcatagcgcttgtattgtgaaacgtgcataccaatcttgtcagccatctgttgttgcgtgaaaccaagctctttacgggaagccgccaatttatcagaaaagctcataggaaattccaaagttgctgtaactgacgtcactatacccctcccgtttttatcgcttgactaaaagtatcatatcagggactatatatattatcaatatgaatcttgacgcattttacaggagtagaggcaatgacccgcgttcccgataccgatttagcccgcttaaagcaaaccgtctcgttactggggctggcgcgtaagcaaggccgtccgatgaaaaaacgcggtgaggattatgtgctgcgctgtccgttccataacgagaaaacgccctcaatggtgatatcgcctgctaagaacctgtatcactgctttggctgtggcgcagcggggtcggtgctggactgggtgatacaaacggaaggggtgacgctgaaaatcgctatccgccggctgcgggagctggccgggttgccggatatggacaatgcagttgtggctgcttcttctttagccgccctgccggagtcacaggcggcccccctgccgcgcccgaaactggccgacctggacgatgacgggcaggcgctgttgcatcaggtgattgatttttatcatcagcacttactggcgtcaccggaagccaaagcctggctggcacgacgcgggctgaatcaccctgaactggtcaatcactttaagctggggtacgcgggccatcacgggatcggcggttcagcgggcttattaccgtccaagagcagtcaggaaggccagcacctgcgcgacaagctgtcggggctgggcgtgttgcgtaccaccacccggcaggaccacttccggggctgcgtcgtggtgccggtgatcggctgggccgaatcggccagtgtggccagccgcgggcgggtgctgcaactgtatggccgccgaacccagccggattacaaagtgctgaaagacagcccgaagcatctgtatctgccgtcaccgctagccggggtctggaatgaggcagcgatgaaagccgctgcggaaattatcctgtgcgaagcgttgatcgatgccatgacgttctggtgtgccgggttccgtaacgtgattgccgcgttcggggtgaacgggtttaaccgtgaacatctcgacgcgttgcagtatcacggcgtgaaacgggtgctgattgcctttgaccgggacgaggccggagaccgtggcgtggctaatgtggcggctgatttactggaagccggtatcgaggcatggcgggtgcagttcccgccgggtatggatgccaatgactatgccgtcaaaagcggcaacgccgaacatgcactggggctggcgttgcaacaggcggtctggctgggacagggaaccgcgccgggcgcggtgttcagccatgagcggcccgtctcgccgggtgtgacggaaaagcctcacaatgccgatgtggctaaaccggctgccttagccgccccaccagagctgactgttgcccccgtgccctgtgagcgcacggcctgcggtgaactgctgatgaaaagcgggccacgtatctggcggatacgggggatgaaaaaatcgccggtgcctgatgtgatgaaagtcaatgtgcaggtgcgggatgaaacgtccggcctgttccatgtggatacgctggacatgtatcacgcgcggcatcgtcagaactacatcagcacggcggcgcaagagctggaatgcgagctgtcggtcatcaaacgcgaagccgggcgggtcttgctgatgctggagcagcaacaggacgcgcaacagcaagccgacgccgaagcctcagggacaacggcggtgacggtcagcgcggaagacgaagccgccgcgctggcgttgctgacatcgccgaacctgacagaacagattatcaacgacatggccgcctgtggggtggtcggcgaatccaccaatctgctgaccgggtatctggcggcagtctcgcgcaaactcgataaaccgctggccgtgttaatccagagcagcagcgcggcaggcaagagcagcctgatggatgccgtgctgaacctgatgccggaagaggagcgtatccagtactcggcgatgaccggacagagcctgtattacctcggcgaaaccagcctgcaacacaaaatactggcgatagccgaagaagaaggggtgcggcaggcggcctatgccctgaaactgttgcagtccgacggcgagctgaaaatcgccagcaccggcaagaacgagcagagcggcgaactggtgacgcgggaatacagggtacagggaccggtgatgctgatgttaacgacgacggccattgatgtggatgaagagctgctgaaccgctgtctggtgctgacggtcaacgaatcgcgtgagcagacgcaggctatccacgccatgcagcggcaccgccagacgctggccgggttgctggctgactcggagaaaggctatctgacgcagttacaccagaacgcccagcgcctgttaaggccgctgaaagtggtcaatc

SEQ ID NO: 25 - DNA, 21520 bp, Photorhabdus luminescens
gtgacttaactgagggcaacattctgtcaacgtaatagcaacatcatactgcgcctgcccaccaacaaacaaaatacgcacaccagcatcattaagtatgaaaccagcctgttcctgactactggttgcatacagagggacagtgaccgcccgaagttgtaatacagcgatatctgccaatgaccacgccatgctgttatgtgcaaagaggccaattttttcttgcacatcaacaccaatctccaacaacgcccggctaatagcgtcggtctttttgccaatatcatgccagtttagttcgagttgttcagccggagaccattggcgaaaagcaattttctctgggtgttgttttatttgttgttgcaaccggtttatcaagtgataaggatgtaaatttttagttatcacaatttttttcctgttcgaaaattttttttcttatcggagaaaaaacagtaattttattctctgataatacctttccgcatcacttattcgcttttcagcttacaggtgttagctatttccttgcagtctaccgattcctgaacaacaggaaaagcctatttatcaaaagttgaaaaatttgtgataaaataaaaaaactcactacccttatccagtagtgagttttcaagttaattatctgctactaagttgactcaacaacgatttcatccattgatgccctttatctttcgttgtagattcatgccaaatcaaataacacggacgacttactttatcccacggtaatgaaaccgctcttattgctaattgttcgctatagtgctcaactaaccatcttggcgcaatcgcaaccaaataggtttgagaaacaatatgcaacacactattcaaatcggtcccctgataaaccaccgaacgcaaacgtttacctccatcataatagggaacgctgaatgaacatatattatccagtgatacaacggcatgatgttcctcatacaattgctgctcactaatactattttcaattcttggatgatgattagaaacagccaaaaccaactcatcattgaataacgggtaatgatgaaaatccatacgttctagctgcgtatagctaatgacaaactcagtttcctgatacctgagctgatgttcaatattatcatgcagatatgatctaatcgtcacacccagattgggtgtgttttgcttcacctgttcaactatttttgccgccaatctaatatctagagggctacaaattgaaagactaaaaaccctatcactattatcaggttcaaaaccaaccccaggtaactcgttatataccaattgtaatgcctgacggactggaccaaataattgatgagctcttgccgtcggttgtattccacgcccataacgcacaaataattcatcattgaacatgagcttcaaacgagaaaccgcattactgacagccggttgtgacattcctaacatctgtgccgcacgtgttacattctgcatctgcataactgcatcaaaaacagtcagcagattgagatccacattacgtaaatgaatttcatttggatcttttttgattgcagttactgaggtgtattcagccattgtttaactccactaaactcatgcagatgatcccagctaataacaaaacatcggaaataccttcatttattactcagatattacgatgactctaactattaacgagatcaattgtcttaatcatttggataacaaataattaagactcgtccttgtacaaatctgaatacgcatagctaacccgcgcatccccttattagtgttaaaaatatataattccaattagtagacaatgtagtgctcattattcattcacaaaaaagtacaatcatgttaacaatttattcaccctgctattttgtatatgatgataaatcaaagaattacacaattcataataaaattactgatttattattattaaacaattttatcagagttattatattatagaattattttttcaaagatatataacataacttcctatttgtatctatttttccaatggcaaatgatgtttttcggaaaaatacaaatcgacttccagctcatcacacaaaaaatacttaattttaattaatcagtataatgcgctattttttatataaatctgagattatcattaaagtcaaaccagaacaaaaaaggataaaataaaatctttttaaatataaacagatcaacacttcaatttaccaccatgagaaaagtaaaaccaagaatcatatgcctaaatgaattcttgacatcacttttaagataacgtatcaataaaagcatacgaatcacaaacactcattaatactattgaaaggttggatcgatatgattcactcaatttgtctactaaacctactactcatcgtatctgatatgcgcggtatgctggtggacagaaaacagagttgattcaaaacagagttggtccaaaccagacattaacaagaacccgcgccaagcgcgggttttttttacctgctgggcgcaaaaaataaccataagaggaacctacatatgaaccagcaagttattatcttcgacaccacgttacgtgatggagaacaagcattacaggccagcttatgtgtgaacgaaaaactccagattgccttggccttggagagaatgggtgttgatatcatggaagtcggttttccagtttcctctcctggtgattttgaatctgtacagacgatcgctaagcagataaaaaacagccgtgtttgcgccttagcccgttgtgtagaaaaagacattgacgtggcagcagaagcattaaaagttgcagacgcttttcgaatccacgtttttttagccacttccgatttacatattgaatccaagctgaaaaaaacattcgaaaatgtcatggaaatggcaacgcaatcaatcaaacgagcacgtcgttacactgatgatgtcgaattctcctgtgaagatgcgggccgtacacctattgataatctgtgtcggatcgttgaaaacgctatcaaagcaggcgcaacaacgatcaatatcccagatactgtcggttacaccacgccatatcaatttggcggcatcatcactaacttgatcgaacgcgttcctaatattgataaagcgataatatccgtccattgccacgatgatttggggatgtctgtcgccaactctatcacagcagtacaatccggtgcccgtcagatagaagggacgataaacggtctgggtgaacgtgccggtaactgttcactggaagaagtcattatggcgattaaggtccgtcagcaaatgttaggcgtttatactaatatcaaccatcaggaaatttaccgcaccagtcagttggtcagtcaattatgcaatatgccgatccccgcgaataaagcaattgttggtagcaatgcattttcccactcatccgggattcatcaagacggggtactgaaaaatcgtgaaacttacgaaattatgacaccagagtccatcggcctgaaagaaattcaattgaacctgacttcccgttctggtcgcgccgcagtgaaacaccgtatggaagagatgggatatcaggataaagattacgatctgggtagcttatacgaagcctttttacgcctggcagataaaaaaggccaggtatttgactatgatttggaagccttagcgttcatcaatttgcaacaacaagaacccgaatttttccatctggacaactttaatatccaatctggctccaacgtgatggcaacagccgctgtatgtttagtgtgtggtaaagagttgaaatcagaagcggccacaggtaacggcccggtagatgctgtctatcaggcaatcagtcgaataactgaatacccaattgaactggtttcttatcagttatcaggtaaaggccaaggaaaaaatgcattgggtcaggtcaatatcgttgtcgaatgctttggacgtcgcttccacggcatgggattagaaaccgatattgttgaatcctctgccaaagcaatggttcatgctctgaactgcgtttggcgtacagagcaagttaagaaagagaaacaacgcatacagcaaaatacaaaggaaatggtgtaaacatgtcgaacaattatcatattgcagttttacccggtgatggtattggccccgaagttatggcacaagcctataagatattggacgcaatccgtaagcgtttcaatatctgtatcaccaccagcgaatatgatgtgggtgggattgctatcgatcgccacggctgttcactaccggcaaaaaccgtagcaggttgcgaacaggctgatgccatattgttcggctccgtgggagggcctaaatgggaacatttaccaccagcagaacaacctgagcgtggtgcactgttgccattgcgcaagcatttcaaattattcagtaacttacgccctgcccgcttatatgccggattagaggtattttgtcctttacgcaatgatattgctgccaaaggctttgatattttatgtgtccgtgaattaaccggcggtatctattttggtcaacccaaaggacgtgaaggccaaggtaaatatgaacgagcatttgatactgaggtttatcaccgttttgaaatcgagcgcattgcccgcatcgccttcgaatccgctcgcaaacgcagtaataaagtcacatctattgataaagcaaatgtgttgcagagttccgtattgtggcgagaagttgttactgagattgcaaaagcgtatccagatgtagaaatcaatcacatgtatattgataacgccactatgcaattaattaaagatccgtctcagtttgatgtgatgctgtgctccaatattttcggcgatatcttatctgatgagtgcgccatgattaccggttcaatgggcatgttaccttctgccagcctgaatgaaaaaggttttggcctgtatgaacctgctggtggttctgcaccagatattgccggaaaaggtattgctaacccgatagctcagatcctatctgccgctttactactgcgctatagcttaggtcacaatgacgccgctaatgcgattgaacaagcggttaactacgcgctggaacagggctatcgcacaacagatttagccggaaacggtaaagcaattagcactgatgaaatgggcagcactatcgcccgttacatagccgagggtgtttaacatggctaagactttatatcaaaaattatatgacgctcatattgttcgggaagtaccgaatgaaaccccgttactctatattgatcgtcatctggttcatgaagtaacctccccgcaagcttttgatggtttgcgtactaaaggccgcccagtgcaccaaccaggtaaaacgttcgcaacaatggatcataatgtatccacgcaaacaaaagatattaacgcttgtggtgacatggcacgtattcaaatgcaggagttgatgaaaaactgtgccgaattcggtatcacattatatgacctcaatcatccctatcaggggattgttcatgtcatcggccctgaacaggggataaccctgccaggcatgacgattgtttgtggtgattcccacactgccacgcacggagcattcggctcgttagccttcggtattggcacttctgaagttgaacatgtactcgccagccaaactctaaaacaagcccgtgccaaaactatgaaaatcgaagtgatgggtgatgtcggtgacgctattaccgccaaagatatcgttctggcgattatcggcaaaacaggtagtgcaggtggtacagggtatgtggtggaattctgtggtaaggcgattgaagcacttagcatggaaggccgtatgactttatgtaacatggcaattgaaatgggtgctaaagcaggtttggttgcaccggatgaaaccacttttacttatatgaaaggccgccagttctcaccaaaaggagagctgtgggaacaagctgttgcttactggaagacattgaaatccgatcctgatgcacaatatgacaccattgttacgattaatgcagaagagatctctccgcaggttacatggggaacaaaccctgggcaagtgatcgccattgatcaaacaattcctgcaccggaatcttttagtgatcctgttgaacgagcatctgctgaaaaagcactggcgtatatggatttgaaacccggtattaaactaacagatgtgaagatcgataaagtctttatcggctcttgcaccaactcccggattgaagatttacgggctgccgcagctatcgcacaaggtcataaagttgcacctggtgttcaggcaatcgttgttcccggatcaggccccgttcaagcacaagcagaagcagaaggtttagataaaattttcatagaggccggttttgaatggcgcttacccggatgttccatgtgtctggcaatgaataatgaccgcctgcaacccggtgaacgctgcgcttctaccagtaaccgcaactttgaagggcgacaaggacgtggtggacgcactcatttggtgagtccagcgatggcagcagcagcagcgattaatggtcattttatcgatatacgccacccagcacagaagtcataaaggagagaatgatggaaaagtttattcaacataccggcttggttgcccctttagatgctgcaaacgtcgatactgatgccattattcctaagcaattcttacagaaagttactcgtacaggatttggtcagcatctgtttcatgactggcgttttcttgatgatgcaggacaaaaacctaatcctgaattcgtattaaatcagccttgttatcaaggtgctagtatccttctggctcgtgaaaactttggttgcggctcctctcgtgaacatgcaccttgggcactaacggattatggttttaaagtggttatcgccccaagttttgcagatattttttacggtaacgctttcaacaaccagttactgccggtaaaactgaacgatacagatgtcaatgagctatttgagtgggttcagcaaaacaaagcttgtcgttttactgtcgatctagaacaacagaaagtccacgctggcaataaaagctatgattttgaaatcgatagtttccggcgtcactgtatgatgaatggtctggatagtattggcctgacattacaacatctggatgccataataacctacgagcaagaacaaccggttttcctacgttaatttttccgttattgatttatcccgtagttttctactacgggatttttctatcacaagcaaaaacaataccaccacgtcaatactcatgcagacaatcattttttcagtcatatacagggttttaactaatatttagtcatcccatatcacatttaaaagaaattaacagatagaaatagctatagtggctggacaaaacgcctccaataccggattattactcgctttaaactgatatgtaaaaaagaagcggggagtacataatgtacaataagaaaaaaagccagtaagctttcttactggctggcaaatcaccattactcaagaaaattgggggagaagccagatttcgtctggcctattgagctactttcaatatggataattatcgtctcaatataaggaaataaaaattgatgaataatactctggagttcctcttttatgcccagttcacgcttacaacaacaattcattcgattatggcaacaccatcaaggaaaagaggctgaaaccacgttacaagaactggcaaatgtactgcattgttcaaaacgccatatccgttcactgctcaacaatatgcagaaagcgggctggttacagtggcaggctgagtctggtcgagggaaacgttctcaactgaatttcttacgtgatggatgggaacttcaacaacaacgagcggaagagttgcttgagcaacataacgttgagaagttggtccaactggttggtgataaagatacagtccgccatatggtactatcccagattgaacgccgtttccgtcagggaaaaaacttactgcggatactctattatcgccccttccctaatcttctacccggttcacctttacgccgttctgaaattcatctggtcaggcagatatttaatagcctaacccgaataaatgaggaaaatggggaaccagaagctgacttagctcatcattggcaacaattatcctcaaatcattggcgcttttatctacgcccggctatccattttcaccacggcagagaattacagatggcggatgtcatcgcttcgctacaaagattacgcaacctgccccttttttctcatattgaaaaagtcaccacgcccaccccctatgtgattgatatttttctttcagaacctgatctctggctctctttattaatcggcagcccacatgccatgatcttgcctcaagagtggcaaaagttaccgaacttctctcgtatgccagtgggaaccggcccttaccaggtcataaaaaacagcgctcagaaactacaaattcgtgcctttgataattactttggctttcgggcactgattgatcaggtgaatatatggtttctaccagaactcgccgagaaactggtttgtacaactctgcatctggaaagtgacagcacggataataactcgctagatagcaggatagaagaaggctgttatttcctattacatgaccatcgttcaactaaatgtaagagagaagacgttcgccaatggctatgcagcctgctaacaccgatcaatctgctagcgcattgtgaccccttttatcaacgccattggtcacctgcttatggtttattactacgctggcatcacagtaagctcatatccgaattgaacaaaccagaggatattacccatctgaccgtcacgctttgtcatcaacatcacgaataccacacaatcagccagatccttcaagccatactgaccaaatgcggcgtcgaattgaaaatcaacatcgtggattatgacacatggttcaatggtaacaccgaaagtgacttctggcttgctaccgccaacttttataatcctctggagttttcgctgttcgctacgctgtacgagatgccattattgaaaaaatgccttggtaatgacttaagtaaagaagtatcacaatggcgacgacaagagttatcgcttgaagagtggtgcgaaaaaatagttgatgaacattggctgcatccactgttccaccactggcttgagttacagggacaaagaagtatgcggggagtcaaaatgaacacctttggttggtttgatttcaaatctgcctggttcaacccatatgaagggtaattcacagaaaaagccagagttatgaacatacacaggtgtgcaaacttgcttttattcactttttctgtggatatctatgtgaaaaaggcaagggtaattcaggtatagctttatattatgaattatcaatctatagaccaaaaaatgaaatagtatttacttttcattgaaatagcagctatttacctcgctatttctagcgtcaatcacagctataatggacgacgttagttgatgagaacaaaaaacaatcaaacatcatgttatccacaggttatgctttttagttaagcaaaaaacagcggtttttgtagaaaaaagtgttagtcaaacctgtaaatcaaaccagtgatctcatttttgtctacttatcccataaaactgtggataacatagtgtaagatcctgttcattattaccggcaataggtgaacaagaacggcagtcaattttacaatatttgaaacagcaataaaaaatgtttgtatatcatgctattatcactttttagctattgaatgaacctcagatttattattcacagaaactaaggctgttttttgacctaaaaaacggatatctcaaatgaacactcttttttcccctccatcgccaccagacaacgaacaacaactgtttgaatgcgcccagcttctggctggcttatcaatgggagaactcgcggcaaaagcaaatttacctatcccacccaatctgaaacgagataaaggctgggtaggcatgttgctagaatattacctcggtgcaagtgccggcagtaagccagagcaagatttcgaacatatcggtattgagcttaaaaccatcccggtagacagaagaggttatccactggagacaacatttgtctgcgttgcaccattaacagggaacagtggtattacctggggaagctgtcatgttagacgcaaattatcgcgggtgctgtggatacctgttgaaggtgaacgggaaattcctctagccaaacgccgggttggctctcctttattgtggagtcccaatcaagaagaagaagagttactacgtcgcgactgggaagaattgatggatttcatcgtgcttggcaaagtagagagcgttaccgcccgtcatggcgaagtattacagttgcgcccaaaagcggctaacagcaaagcattaaccgaagcaatcggcgtacacggccagcctattatgactctgcctcgcgggttctatctaaggaaaaatttcactgctcccctactggctcgtcattttttgatttaacgttgagctctgactgatttttacatcgacatacttaccttacatctaatcacgcgtataattagatttttaccttaaggttttaataagcaatgttagaatggattgttgatccccacgcctggatggcacttgccaccctgacaattctagaaatcgttttagggattgataacattatctttttgtcacttgttgtggcaaaactccctaaccatcaacaaaacaaagcacgtaagatcggactaatgggtgcaatgctaatgcgcttggcgctgttagcatctattgcctgggttattcggctgacctccccgatattgacagtttttgagcatgatatttctgcccgtgacttaatcctattctttggcggtctgttcctgatctggaaagccagcaaagaaatccacgaagcgatagaaggtgacaatgaaggagagctaaaacgccctgttcactcctttctgggggccatcatccagattatgttgctggacattattttcagtctggattcagtcatcaccgcagttggtctgtccgatcatctattcattatgatggcagccgttatcatagccgtcggtgttatgatgctcgccgctcgtcctatcggtgaattcgttgaccgtcacccttccgtcaaaatgctagcgctgtcattcttaatccttgtaggctttacccttattctggaaagtgtacaagtgcatatacctaaaggttacatctattttgctatgttcttctcaatggcagtagaaacgctgaatctcatgcgtgggaaaaagaaaagaaattagcagtagcacgacaataacgctaaaaaatatcattctttgattcaaaaagtacgccatagatgcccagttcagtactgcggcatctcaattttgaaggtagcaagtgaaacacgataaagggtaccaaaaaagcatataaaggttacaccaatccaaataatagctaagtttcaaggggatagcgccacaactcagtacgagcttatttcactatcccctagaactatatatcccctaaaactatattaagactatgtactacttaacgcttcttagacgcctgtaaataaagcatctctagtgcaatagttgcacctgccaaagccgtaatttcagactgatcataagctggagcaacttccaccacatccataccgacaatatttagcggttgcaaaccacgcagcaatttcagtgcccgatcggttgtcaaaccaccaatgacgggcgtacccgtacccggcgcaaaagcgggatcaagacaatcgatatcgaaagtcaggtaaaccggcatatcgccaaccgtctcttttatctgagcaagcaaatcatccacactacggtcattaacctgatcagcatccagcaccgtaaaaccattgtcccgtccatgttcagtacgaataccaatttgtacagaatgatgcgggtcgatcaacccttcatttggcgcgtgatagaacatagtaccgtgatcaaattggctaccgtttggataggtatcagcatgagcatcaaaatgaaccagagccattttgccgaaatgtttggcatgagcgcgcaacaaaggcaaagtaataaaatggtcacccccaaaagagagcatacgcttaccggaagccaacactttttcagcatgagcttgtaatttatcactcatatcctgagcatcaccaaaattgaagaccacatcaccacaatctacaactttgagacaattatgtagcttaaaatcccacggccaacggcggctttcccatgccaagttagtagaaacctgacgaatagccgcaggcccgtggcgactacctgcacggcctgacgttgccatgtcaaatggtacgccagtaattacccactctgcatcgctggaatatggctggaaattcagcggaaagcgcaggaaaccgaaggcattagaaaccagagagtcatcttgttggttgcccaaggtacttattgtcatgagatatatcctcaaaagtttcccgacagaacaaagctatttaattccagaatacatgccatgacgaaatggggtatgtctgagataaccccatttatctgcatctccgcatctggtttatatcaaataacattacctgtatacaggaggcttaattaacaccagaagattattcatcttccagatatgtgtagccataaagaccactttcaaattccagtaaaaattgctcttgcaaacccgtatccaaatccgcgccttttacttgatcacggaagcgagccatcagtacattagggtccagtttcacatattgcagcatatccgcgactgaatccccctcttcactttggttataggtcacttcgccattatcgaatacataaacatcaatagccgctgtatcgccaaacaggttatgcatattgccaagaatttcctgatatgctcccaccataaagaaaccaatcattggcggacaatcaggatcataagcgggcatcggcattgtcgcggctacaccatcaccatccacataatgatcaacaataccatcagagtcacaggtgatatctaacaataccgcacggcgatccaacggcttatccagtccctcaatgggtaaaacaggaaataactgatcgataccccatgcatcaggcagagactggaacagtgagaaattcacatagaatttatctgccatacgctcttgcagctcatcaataattggccggtgagcacggttacttggatcaagatcctgttgaatacggcgacagatattcagatataactcttccgcccatgcccgttctgtcaaatccagcatgccatgagcatattgtgtatgaacatcatgtagatcgagttgaccatcatgcagcgattcacgtaaagagcgtctatttccttcagagtgcatctcctgccatgtttcccacaaactggtgagtgggcgggaagcatcctctgccggtggtgtcgtctgcgtaaattcattacgctcaactccgataacattggagaccaagacagtatggtgagcggtcagggcacgaccggattccgtgataacagtcggatggggtaaaccatgctcatcacaagcatcaccaataccccagatgacattgttggcatattcattcaacccatagttcacagaacaatcagattgagagcgggtcccttcataatcgacccccagtccaccaccaacatcaaaacattgaatatttaccccgagtttatgtaactcgacataaaaacgcgctgactcacggacacctgttgcgatatcacggatattcgccaactgtgagccaaggtgaaaatgcaacaattgcagactatcaagtcgatccacagcacgcaaagtctcaaccaattgcaatacctgagttgccgccagcccaaacttcgatttttcaccgccactggcttgccatttacctgaaccctgagatgccaaacgtgcgcggactcccaagcgcgggatcacattcaatcgttcagcttcttccaatacttgggcaatctcagacatcttttcgatcaccaaataaaccttgtgacctaacttctcacctattagcgccagacgaatatattcacgatctttatatccattacacacgatgacggtacgagtcatacccgcatgggccagaactgccattaattccgctttggagccagcctcaagccctaaaggttcaccggaactggccagtgattcaataacgcggcgttgttggttaactttaatgggataaactaaaaagtaatcgcctttataaccatatgactctctggcacgtttaaatgcggcattgattgaacgcaaacgatgttgcaggatttgagggaaacaaaatagcgccggcaaacgcaaatgtttctgctcctgctgaactcttttcaccaattccgcaagatcaatttttgcccccggcaaatcaggatttggacacacactaacattgccaagatcattgacgtagtagtaactccctccccaatatgcaatattgtaagtctgttgcattttacgagcgatattatcattcatggcagtctccttaagggagttagagtttttcgccttcgcctgtaattaataaataacccaaaacactataatctcgcgtgttgagaaatatcagggaacagcatgctctcaggttgtaaaaagcgtttagttactactaaacaacgacaaaattaccgagtgacaatacgcctgtccgacatatccggcctgtttgctgacaacagataacatcgaattaaagacatattgaaaagaaaggaaaaagacgcggatacatccgacgacaagtgtggctgttggccataagcaatcagcagataatggttcattaccccattcaccccacacatgactcatatttaaggagccattttctcgattgagaaacagaagctagttagctttctgcgagtctgtagcaaaaatagttcaactacggccgcagtttatactcgcaatcacataaaattgcaaaatgaaattgaacaaaactgacatacaaaccaagaaattatttattcacccgatgaaaatgactcactgagctaaaaaaatctagcacatggataagaattaccctaaaatagccatctagatgttaatccatccatttccaaactgaaattatattttaaggtaacgttatataatgaccacataccttttcacttccgagtctgtttccgaagggcatcctgataaaattgcagaccaaatatctgatgccgttcttgatgctattctagaacaagatccaaaagcacgagttgcctgcgaaacctatgttaaaaccggcatggtcatggttggtggtgaaattactaccagcgcttgggttgatattgaagaaattacgcgacaaacagttcgagagattggttatgttaattctgaaatgggttttgatgcaaactcatgtgcagtattaagtgccattggtaaacagtcaccggatattaatcaaggtgttgaccgtgaagatcccctgcaacaaggtgctggtgaccaagggctaatgtttggttatgcaaccaacgaaactgacgtactcatgcctgcgcctatcacctatgcgcaccgtttggttcagcgtcaagctgaagttcggaaaaatggtgtactgccgtggttacgccctgatgctaaaagccaagtcactttccaatacaataacgacaaaattgtcggcgttgacgcggttgtactttccacacagcatgctgaaaatattagtcagaaagatctgcaagaagcggtcatggaagagatcatcaagccggtactgcctgctgaatggttaaatccaacaaccaaatatttcattaacccaaccggtcgttttgtcattggtggcccgatgggtgactgtggtctgactggtcgtaaaattatcgtagatacttacggtggcatggcacgtcatggtggcggagcattctccggtaaagatccatccaaagttgaccgttcagcggcttatgctgcacgctatgtagcaaaaaatattgttgctgctggtctggctgatcgttgtgaaattcaagtgtcttatgctatcggcgttgcagaacccacttccatcatggtggaaacattcggcactgaaaaagtttcaacagcaactctgactctactggtacgtgaattctttgatttacgccctcatggtttgattcagatgctggatctattgcacccaatctatcgtgatactgccgcttatggtcattttggtcgaccacagttcccgtgggaagccactgataaagcagaagcgctgcgtgatgctgcgggtttgaaactatcagcgatgaatatgtaaaaatataaaaatggaagccgggtttgaataaccaaacctggcttttttagcattagctaatgattgaagaatccctcaaaatattattatcggttgttcaaagatttctaatagaattcactgatccttacctatttattttcaacacatgaaatcagctagcattccaatttatttacaacaagccatcatgaatactttgcggcaaaaactgcaacaagcaaacttatatctcaaccgtgattttcctgaacctacaataaactatcgccaacggggaactaccgcaggcagtgcctatataaaaaattgggaaatccgtcttaatccagtgttactgattgaaaaccaacaagcttttattgatgaagttgtgccacatgaattagctcatctattagtttatcgctactttgggaaagtgcctccacatgggaaacagtggcgttggatgatggaagaagtactgaacgttccagctaaccgtacacacaaatttaaaatcgattcagtacgtagtcaaacttttacttattactgtaattgccagcaacatgaactaaccctacgacgccataataaaattctgcgaggagaaagtcattatatctgccaaaaatgcggagaaaaacttattgctaaatcaatagattctctcaatcctaatttatacccaatggatttcaagatgcatcgcggcggaaagggagtgaatccccgggagcataggtaactatgtgaccgcggtgagtgagtgcagccaacaaagaggcaacttgaaagataacgggtataaactcaaatcctgtaaggatacgtaattcaccgagaaaatcataaccagagatcaagattgtcattgttttatatgcactaaataaagaacttaatattgcaaagataatatttattgccggaaaatagagaaacccgccaatttaattcagttatttctcttcacatgcggcacaaaaatctgattcatgtaatgctgggttttcacatttaatacacttcataaaacttctccaaatagtaaccttaatccaaggattgattattaatttacgtaaatcgtataggtaatagtatataaaccaataacttattagcccgataaatacccctgtttttaataaccttatttacatctccaagtgaaaaaagaaagattccatctataaagaaacgacacaaccactttattaccaattacagtactaactgctttacctaacattgaggttgtaggatcttcccctttaactttacttcctaaataagtgcctcctgtattaacaagggtgctaaatagtgttcctttaccttgagttaatgcgcctgttcctaccgctatcagtgtatctattgcactatagtgcctcccacaacagaagcacctgcaccccaagcgactaacaatcctcttgccggatcttgcccttccaggtgatcacttttggcatgttttgacaacgccgctgaaatctcttgaggggatttaccttcatttagcatagcggtagccagactggatgctgaccgaccgtaatccgccagcccttttggcaagctcagtgcattattgtcagcaacaacccattccattgcgacgttgaccgccaaacaccgattttccctgcgcactcagtcagttaccacccattttttccgatgtgcgttcaccgccggacccaaaaccccctgacgcgcttttcgcttccgaaggccggtttttcccgccgcgctctggtcagtgtagcgcctttttcggcaacgggcgaacgtcgcccaactcgcttgggcggcggacgcccgttctgcgggcgcgggcggcagagagcccgcaagcggcgcccctgcgacgctctgaggcactgtggcttcggtttgcgtatgaccttgcatgaccacgcggttttgttttgttcagggaagcccccgggggctgcacggggcggcgatggcgagcacgggaatgagcaaggagcctgcgactgcgaaccgggcgcagccagtgcagcggggttggggcggggggaagtcaatgagcggaggccgcaggccgacctgccttcagggttgttggccggacgttggcacggcagctaaagaagaacacgggtttttgccgaggactggctcagccgctgacagcagaaggcgtcagccttgtgcgccacacctgccaatgctgacccgcgggggcgcaagacataatgccaattatacgcattaagccgctcacggatgctcaggcggttgcccgggctcaccggcgcagtgcgtataattcccccgcattatgttcaataggcgttgggcggcctggaccggcttaacggggacgctcgtggttgagccgcctgacgactatttacccccgcgtgcgccgaggctgacgggcagtccggccacggtctgcccccacaccgaacccgcccaacgtaacggggacgggcggacgctcagcggctatcggaggttcaggtcagctctgggctgtccggcggcgtgtcggcatcggcgttatcgtcggcgtacaggtcggccagtaaacccacttcatcggcgtcgcggactttttcgtcggccatttgctccgccggatgcgtactggcgtgcaccgcctgcaaggcccggatagagacctgcgtatacacctgggtggattccacgctggcatggcctaacatggcctgtatccagcgcaggtccgcgccgttctccagcatctgcgttgccatcgcatgccggaacaggtggcaggcaccttttttctcgatacccaccgcgttgatataagctgtcaccagattgctgataccgttagcctgtaagccgtccagcccatccattgcgacgaataatgccttgacgtctggattgacgataagttgtggccgcacctgttgctgatagcgctgtagccagcttaaggcccgttcaccgaggggcaacacccggtctttattccccttgccctgccggatggtcaccgttttgcgttttccgtcaacgctgtacacatccagccgggttaattcgccccgacgcatcccggttgaccagagcaactccatcaacgcccggtcacgtatcccctgcaacgtcgtcaggtcaggctgcgccagtatctgttcggtttcatcgatggtcaggatatagcgcggcaggtgcttttccagtctggggagttcaatgtccgccgccgggttcgccagtatcagattctgtttggtcagccatttgaaccagactttcaatggctccagttgggtacgttgcgtccgggtgcttaacggttcaccgttggtcttgcggtactgatacagataacgctggtaacgctccagtatcggccgggtgatatccgctgcgtagtataagccgcgctcggttgcccacaggataaagtggtaagtatggtgcgtctgtactttcagcgtactttctgaccagttccgttcctgtcgccacactacaaagcgcagcaacaacgcatacaggctcttcgggtcatgcgccggccccacaggctgacggtagacgtcattaacggtcagaaggctccccttgcggggtttacggtttgccatgattgacctccggttgagattgaggggcgggcgcagacaaggggcgcgttttcttttttccttttatcacggtgtcttccgttaccccgacttgcggtacgctgaacccgtgctctgcctgcccggatggggattttttcaccccagacttagcccggacctggcccagacttgaggcagacgggtgttcatttaagtcagacttgctctcatgacctgtcgggacggctgccggcgttttatccctgtcgggtacgggcaatgcgcctctgtgattattttccttaataactgcgttttcatctgcccggacttgtgcccctgccggcccttgttctgtccgggctgacgcgggtttttcttccccagactcaggccagacttgccccggacttggggaagacttacgaccttccgggtcagacttgcgttcactgccggcggtttctgagtccgcttctccgacatccagcaggccgcacaggtgggctgcgccgttgtcttctccgtcccacagcagttcataatgcagcaggtgcccccggctgccgccatgcaacagcaggtattccatttccgtcagccgttgacagtggtttttgagctggctgtcgctccagtgggtaaaggcgcggatatcccgccgggtaaagcgcacttcatttggctggcagtgctggatttgcgcctgttcgttcaccatctcttgtatcagcagtaacagtttgcgtgtttgcggcggcatttcatccagcgtgcgccccagcacctcatgcgccagccggttggcgagggcaatatcgtcttgggtgacttcgatatattcgatgacctgcccgcggtgggtcgttttcttcacttcacgttgatactggtgcagcagggcaatggcctgtatcagcgtcaggtatttcatgtggtcgcgccgcatccgggttttgtctgacaggaacgtcagttggtgggcgtaaggattgaccactttcagcggccttaacaggcgctgggcgttctggtgtaactgcgtcagatagcctttctccgagtcagccagcaacccggccagcgtctggcggtgtcgctgcatggcgtggatagcctgcgtctgctcgcgcgattcgttgaccgtcagcaccagacagcggttcagcagctcttcatccacatcaatggccgtcgtcgttaacatcagcatcaccggtccctgtaccttgtattcccgcgtcaccagttcgccgctctgctcgttcttgccggtgctggcgattttcagctcgccgtcggactgcaacagtttcagggcataagccgcctgccgcacgccttcctcttcggctatcgccagtattttgtgttgcaggctggtttcgccgaggtaatacaggctctgtccggtcattggccagtactggatacgctcctcttccggcatcagctttcttgc

SEQ ID NO: 26 - DNA, 71428 bp, Photorhabdus luminescens
  misc_feature (2186)..(2186): n is a, c, g, or t
  misc_feature (2228)..(2228): n is a, c, g, or t
  misc_feature (2354)..(2354): n is a, c, g, or t
  misc_feature (2357)..(2357): n is a, c, g, or t
  misc_feature (16202)..(16202): n is a, c, g, or t
agtttttcatatataaagtccacttccacgttctcagataatgtctgatgtggcattcaatttcaactaccgagtaatcctcggtagttgataagtatttagcagagaatgaagatgttactttctgcgtagtgaagtttgagctatattgaactaaatcttcttatatacgagagatatatagctaactcttaagaatctttatatccaattaaactcagcttctgtggttagagttgcgtctaaattgacggctgtaattctatagtaataaacagcgttaggaggcgcgttgagtattttagtttctccaggccagacatcaatagaattatagaattcatactccccaaatggggatgcccagaaatttaaaaccctcattgctgcttggccgttgttttttattgctatacttctccatcgaataggaatggctatattcccatttttataagcttcgatagcttggttagggtttaggaatattttgaaatttgttgatatcatattggtttccttattattgctgttatttgttggcatatataatcaggtgatttcacctgtgacatttaacttaacactttctatgagcagttaaatattgaaatttatcagtgacgtaaaaggaataaggtaaacgtaaaagcggttaatacacattccatgctacgcattgcgtggccttttcttttttcacacacgtttaacgggatcttaatttctagttggggtggaaatatgaaattcatggacaagccgattgacatctggatgtagctatgattatggctgttatcagtcaaagagatacgaaaatcccgacagtggcggggacatgtattcctgacggatttattgccgatagcggtagtcgtaattaatgacgaaggagttacaccgataaaaaatagataacttaatatcatgaatcatgatcttttcttattaaagcggctcatgacttgctgaaatgagccgcaaagaaatggataacccgcttgcatgctgtttaatttaatagaccatccattgatggggatttaatcattttttaaataaaagtcaccattatttcttagccagaaaaggagctgtatataggatagttgatatccagatgattgcggtgataaacataacaatcatcctggtgaaacgccagtaaaatggctttggcggtgtagcgatgggaataggtaattgagtattttggagctgacgattatcttgttcgtcatcttgaagtggcaggataaaacgataaccttgtcggtacaccgtgtgtatggcttcacctagatcacaataacgtaatgttcggcgtaacttgcagattaattgcagtaaattggtttctgctaccccatctttgcgttcaggccaaactagagggatcagttgctcccggtttaacgtattcccttgggatgcatgttcccacagtgcaagtagcaggcgtttctctttctctgtaatgataaatatatttttaccatgaattattttgtttgagtcacagtctaaataaacatctctagttattttcaacataacgcattctctgcctctgtttagtgtttgtctattttttatatagccaggagggctcaataggcacttatacctgttagagtttatatattttatgaatgagtaatgcaagaaaataaattatttaaaattttttattttattttgtcatatgggttatttttctgttttttattaagaagtaaaactaatgataattaattattagttttatttatattgtgatgattacccatgaagtgatgtaagatttagaaatatagataaaatatttttaggtgttatttattgtttataaattccttttgtaaaaattaatgaatagatatccacgagcaataatgctgtgaattgaacgtgatttatttatgtaattgaattaaaaggtaaaaaatagataaaaatcattattttttatttttaacttttatttggcggtatttgagtgattactgttcgatgaatagtttaaagctccaacagtgtgatgtttatcacgtattaacttacgttaatcagtagttagtcagtagtcaggtcgcctcattccttgaaccttgaatgagggtttggatattaaagcacagtgaatatataccctatggatttcaagatgcattgcgacggcnagggaacgaatccccgggagcatagagaactatgtgaccggngtgagtgagtgcagccaacaaagaggcaacttgaaagatgacgggtatacaagtaaggcatagggcatgatacttaagggcggtagcgtacataaaatgatatgtgttctaacccggttatgaatntanctcttaaggaaataacaatgtctacacctgtcgatcaaattgctgttcaataccctattccaacttaccgttttgtcgtgaccgttggtgatgagcaaatgtcttttcaaagtgtatcgggattagatattagctatgacacgattgaatatcgtgatggaattggtaattggttacaaatgcccggtcagcgtcagagaccaagcattaccttgaagcgcggtatttttaaagggcaatctaaattgtacgattggattaattctatttcgcttaatcagatagaaaagaaagatatttctattagtctcaccgatgaaacaggctcaaatttgctgattacctggaatattgctaatgctttcccggaaaaactcacagcccccagttttgatgcgaccagtaatgaagttgcggtacaggaaataagtttaaaagccgatcgagtgactgttgagttccattaatacactgtttggtgtcaggactgtttgttgtcaggaatagtctggcacgtcaatgcagtgctttttaaaggcgaatattatgacaacttatcattatccgggtgtctatattgaagaagatgcttcattggcactctctgtccgtaccagtgcaacggcggtccctgtttttgctgtcggagatgaaaatctttttaggtcaggagatgactatcatcgtgttaatagttggctagaatatctggctctaagaggtagacaatttaatcctagtgataagcttgatatttcactacgtgcctattttattaacggcggtggatattgttatctcgttaaaactaaagatttagtaaaccaagttccaaagttggatgatgtcacattgctggttgctgccggagaggatattactactgctgtaggtacactttgccaaccgggcaaaggcttatttgccatttttgatggcccagtcactcaaatagatttgaaccaaaaacccgatgaagtacttaagatttataccgctaccgcctatggcgcagtttattatccttggctgaccgctgagtggggagaaaaaaatgaagaagggaaaagagctagcgttgatattccacccagtgcagtgatggccggtatttatgccagtgtcgataacaatcgaggtgtctggcaagcgccagctaacgttgctattcaaggaggattacaacctaaatatccggtgactgatgatctgcaaggacaatataacaaagataaagcgttgaatatgatccgtacttttcctaaaagtagcccattggtttggggagccagaacacttgaggacagtgataattggcgttatatccctgttcgccgtctgtttaacagcgcagaacgagatattaaaaatgccatgagctttgcggtctttgaacctaatagccaaccaacttgggaaattgtacgtcgagcgattgataattatctctattctctctggcaacaaggcggattgatgggcaataaagctgaacaagcttattttgttcaaattggtaaaggtatcaccatgactgatgacgatattaaacagggcagaatgattgtcaaaataggtttggcggcagttcgtccggccgaatttattatcttgcagtttacgcagaacatcggacaataattggaggcagtatgccaacagtaccaacttatcctggcgtctatattgaagaagatgccccaccggcgctttctgtcagccaagggaatacggcaatccctgtttttattggacgtttttcactgaaaaaacctagtacgactacgacaccacaagtgacacgtgttagtagctggttggatttcactaacctgtttcatgtgggttgtgttacgtcaatagcgattaaatcaacacctccatctgccgctaaaaaacctaagaaagttgaaaaaattgaaggtgatatatcaaccgaaaacaaagccaccaaagaaaatgaagaggttaatagcaatacagaaacagaagaagaaaaaaaagctgattacacttatgaggtgactgtcggtacctatacaacaagcagcgatgccttaaaactttatttccaaaatggcggtgggccttgttatatcctaccgattgctgattcggaagatactaaaactctggctttaatccctgagttaattaagcaggctttagaaattaccttgatcgtctgccctgaacaagattctgattaccaaagcaagatatataacaacctgacatcttcattattgaatgagggctatttccttatcgctgataatcaggataaagcattcgctatcagcactaacgtatcctcacaaaccgcaacgtattatcccgcggtgaaagtctcacaacttatgcaaacggaagagagtcttatagatgttttaggttataaggatgcaaaagcaaacaatattaccaatttgacggaactcaaagagaaaaacccgaatgtctataaggaggctattactgcaataaagaatgtaaacaaaactattcccgccagtgcaatcatggccggcgtctattgtgctactgatgccagccgtggtgtctggaaagcaccggctaatattgttctgagtggcattagtgatgtagaagaacggctcaccgaagatgagcaaggtaccatgaatcaaaaaggtatcaatgttatccgctatttcaataatcgagggtttgtcgtgtggggtacacgtactctgaaagatgatgacaactggcgctatattccggtacggcgtttatttaatgcggcggaacgggatatcaaacaggcaatgcgatttgccgtctttgaacccaatagtcaaccgacttgggaacgagtaaggtcagccattgacaactatctccatcaactctggcaacaaggggcgctggttggcagtcatccccaagaagcctattttgtccagattggtcaaggtgtcaccatgtccgaggtggatattaagcaaggaagaatgatcgtcaaggttggtatggcggcggttcgcccggctgaatttattatcctgcaattttcgcaaaaagtcgcacagtaactgtactggggcgcggtttgccgcgcctgtcctgttgaggaaatgataatggaaataacacagccgggtgtgacaagcgcggaaaacctgatatcccagaagccgggggatgcatttattggtgtaccggtttttattggtgatattccaaaaagttcgggcagtaaaaccatagtcaaattaaacagcctgaccgattttaccctaaaattttgtgagtcaggattaatgtacgactcattaatgtacacctccgtgcgccacttttttgaaaatggcggtcaacaagcctatgtgctgccgctgacccttgatgaaccactgagcgattttcaatcattgatcatcgcactgcaacaggattggcttaagcaggctattgccgcggagagtgctattacactggttgtcgtccctgatattgtccgttttaatcagacgggagagtccggtgccgagatagatctttggttgcagttttggcagtcgatactcgaactgtgcaagagccgacgtggcatcatgggattgctggatgccccggatgatccggtactggccgcgacatgtttggcgcagttttcctcaagtgatcggcaatggggcgcggtatattggccggggctgaaaaccacatatcaagaaaatggtcaacatatcatcctttcgcctactgcggcggtggcggcggttatccagcgtaatgatcatcaacaaggtatctggaccgcaccggccaacgtagctttagctaaggttgtcagcccagtacgatcctttattgaagctgatgcgctctttaatcagaatggcacttcgttgaatctgattcgcagcttccccggcaaagggattaaagtctggggatgccgaacgctggataacatccccggttctccctggcgttatatccaaactcgccgattggtctcctatatcgaagctcatctcacccgattaggccgggcttttgttttcgaacctaacaacgctatcacttggatgaaacttaaaggccaaacttacaactggctgcatcaattatggttgaaaggtggactgttagggacccaagaggaccaagcatttgacatattactcggtgttaacgaatcaatgaatgaagcggatctgcgggctgggaaaatgattatgaaaatcaaactggctctgctcattccggcggaatttattgagctgagtctgacgtttgatacgcgcaccgggaccatgggattaaattaaacaggggcaaaatatgcacaatctatacaccccgtcagtgtcacaccgttttatcgccagttttctgtttaacaatattcccagtccacttgatattgcctttcagcgcatatcggggctcagtcgtgaactgcaaactactcaacacagtcaaggcggggaaaacgccagaaatgtttggctggccgagaagatccagcacggtagtttggtattggagcgtggtgtgatgacgattacaccgctgactctgatatttgatcgtgtcttgcgtggggaaaaagcggtttatgctgatgtggtcatcatgttgctgaatgaaaattttttaccggtggcaagctggaccgtgagtaacgcgttaccggttcgttggtctaccggtgactttgatgccaatagtaatgccgttttggtcaattccctggagttacgttatcaggatatgcgctggttaggagtgaaagcatgactgtagaaattaaagaactgattattcaggccaaagttaccgattctgcgagtgatttatcttccctgcgaaccttagctcaagaagcactggatgacgctcgcctgattgagagggtgaaacgggaggtgttagaggcattacgtgaaaccgggggcgattatgagcttaattgaacgtagtctgtccaaattgacgctgacggcttttaaagatcgggaaggtaaaatcttggtgggcagtttaccggtgatgtataaccccgatgcgatccagttcaactatcaagccaattatagaaacgatgaaagcattacccatgcccaccaaggcaaccattatgtgtcgtctcagcccgcgggcttgtcattagatctactgtttgatgcctctatgcccggcaacaatacgccgatagaaacccaactggcgacactgaaaaccctctgtgccgttgatgccggtaccaacgtccctcattttcttaaaatcaagtggggcaaaatgcgttgggaaaacaaaggttattttgcttgccgggccagcggtctcaacattcattacaccttgtttgatcgggatgccatgccgttacgggcaattgccaccttatcgctggtggcggatgagagctttattattcaggccactgagcagcagttaaaatcaccaccggctactgcggttagcgtaaccgatatgctctctctgccattgattgcattgggcgctggcgcggctctggcgggcggtatcgattatctttcgctggcttggcaaaacgatctggataatcttgatgatttcacgccgggacaaacgctacaagcacggagaaaggcatgaagatacctccgatcgcgattaagataggcggcaaaacgctcaatcagtttacagttatcagcctgtcagccaattaccctatcaatggcattccttcggctaacgtcactttgggtattattggtgattccagccatatttttgatgccaaggtgcaggctgagttagcaaattgccgcccgaaccatgaacttatcgtgcaaatgcaagaaaccgtgttgtttaagggagtcatcgttcggcagacactggggcttaaaggtcaggacagtttaatgattctgacggcaaaacatccactgcaaaaattaacccataattttcactcacaactgttcagtaagcagagtgatgaggcgattatcaagaagctatgcagtcaggctggggtacctgtcacgataaaacaggcacctcaacttaaaacggtacatgagcaaatggtgcagtttcgttgcaatgattggacattcttaaagagccgattgagtgctaccaatacctggctgatccccagccatgatgttgttacgttggtcacgccggaatcacttaatcggtcaactgtccacaccattcgtcagcgcggcgacctccgggacattgtgctgtttgaagcgaatttgcaatgggataatcagcgcagccccaaaacggtgagtgtacagtcttgggacattaaccaacaaaagttgtctcaggcgattcaggtaaaaaatagtgggtttgggcatggtcaacttgctaccgacacgctgaaaccgctgaccgatcaagagtggcaatggattttcagctccccattggataatgaacaaaccaaacagtttactcagggcatcatgggcaaccggcgaaaccataatatatccggcagctttgaggttgcaggccatgattgctatcagccgggtgatgttttggcgttaactggctttggggcgggaatggatggtcaggcgattatcactggtgtcagccagatcattaacccgcggcaaggttggcgtacccggttaacgttaggcatgcaatcagatatagaacaggttatacctcaggttaaagagttgcatatcgggatcgtagaaaaataccaacaggatggccaatcgctaggccgtattccggtcaacataccggccttaaacttaaccaacggcaccctttttgcccgtttaggcaaaccttatgctagtcatgagagtggattctgcttctatccagagccgggggatgaagtaataatcggtttctttgaatgtgatcctcgttttccggtgatattaggtgccatgcataatcctaaaaatagatcaccgttagaacccagtgaaaagaatcaaatgaaaacgttagtgattaaacagggagagaatcagcaggcattaatcttcgataataaagacaatacgctcgcatttaatagtggaaaaaataccttatctttgcaacaggataaagatatcactattaattccgctaaaaatctcatcactcaggcgcaggaaattaatattcaagccgaaaaatccctatcagccgctggaaaatctggggttgatattaaaggggcgaaaattaatttaacacaataataggttaaataagatggcagacaaaatattagccgatatttatggtcggggctgggcatttccgccacaattttcttctcagacgggagtcatcatggcagaaggggcagaacatgtccgccagagtatgaaagtactttttctcaccgaacccggtgagcggattatgcgtgaagattatggctgtggtttgcatgattatctgtttgaaaatatcactgatgaattaatggcgcgtattcaaacgcgtattgaagagcgaatattacgttatgaaccccgagtggaaatgactgaaattcaggtgaatcaaaaaataaatttgcctaatagcctgcatattcaggtgagctatgccctgagaggtagcgaaattagccagcaagttgaaggtattattaagcttggtgaaggagaagtgatcttatgagtaaacaactggtggttgatggcgacactttgctattcgaacccttgttcggtaaccggcaggtcactattctggggccggcaatcgtccggggcagtggtcacgttaagatccaaggcaaaaaaatcgtaatggtgggggatgaaaaaaagatacagcttcaagcacaatatattactcctagccatccaatacccggcatgggtatggtcaccattgctcaattggatgtcggtcagcaggtaaatttttgtcgtagccctgccacggtgattgtggttggacagcaattcattgcccgttttaccccatcacagccggcaaataatccatcgagtggccccgatataaccgcacccagtatgggaaaaggccgatttattgccagtcaatatgctgtcagtgctggataaataatgttttaatttatttttaaatagtaatgatctcctgaaaaaatattaaagttatattcaaataacaggtggtataaatatggaacagaccgaattagaaaataaacttaccgctatggtatcggatacgacttttaaacttgatgaaagaagtacgcgggatatattaaactggattcaggaatatacggaaaaaatcccttttgaacaggggaaagaaaaattctggcatagcttctactttattcaggaaaatcatcctcagcaattagcggatatttaccaaaatgtgaataaagccaatggtcttttacccgctcatcaagcttttttattggcttttttaaaacttttagaaacgacaaaaatattattcaatacctttccggcgcgtcatcgcgatctttattatcgggaattattgggtttaacgccgagaagtgcccgagcggatcgggtggcgataggtattaccttgaatggaggtaacgcagaatatcttgtccctcaaggaacttactttgatgccggacatgatagcgctggcaatccattacagtatgtgtccgagtcgaatgtattggtgaatcaaggagaattgactgacctatattggtatcgaaaagagggcgatggttggaaatcggcaatgtcactgaatcttgcagatagcattaaattacctgagaacggtattcggctttttagcccaacacctaatgatgtttcagttctgtccggttacttaattacttcgcctttatttgcgatgttagcaggagagcgcacgattaaagtcacattagccagcaagtgggatggtgaatctgagcatatcacggctaatatcagcacagaaaatcgctggctttccttggcggtaaaacttgtcaacaaaacaacgcttgaacttggattgtctgccagtgatgcgtcgataactcctcctgatgccttggataatatgacgtttgatgtaccggtattaaaactgggtaccaaacagggaccgattttgcccaaaattatagacatagaagtcagcattaatggtaaccaaagtgtgtactatgcctctgatagtggtattgaacgaacggatgcatccagttttccctttggtcaatcaccgttgctaggctccggttttaatctgattgcccctgaatggtatggcactgaaaacgcaacgctcacgattactccccaatgggttggcttgcccaaagaaggttttaaagagtggtataaggaggttaagaagggtaaagaacttaaccctgtttataggattactgcaaatgacgcattcaaagtacagggctatttaatcactcctcaagaaagaaagacactcagtgctacccaatcgttatttggtggagataaggaaccacaggtccaaagcttaaaattcaccttaccggcaatgaatcaccttgttgcagatagctcatcgcccaatgaatggcctgcgtctgtgcgtatagaactggccggacaggattttatgcatacccaatattggcaagatcctaccggtaagaatttaccttataccccacaaatcagtgcattgcagattcaattcagcgctaaagctaaacctgagcaatttgctgtttaccctctgacgccttttggctggggcgaggcaacagcagaaatgcctgcattaactcatgaagcattctatttaggcttcacgggtgtacagccggggcaaactttatctctttattggcaattagaaggtattaagaagctcactttatcttggttttatctcaacaagcacaatacctggcgtaaattggataaattagttgatgatcaaaccggtaacctgtttgagcgaggtatctggcgcaccttattgccaaaggaggcttcaaataaagccgctttgatgccgacggggcggtactggttgaaagctgagatagttggaaaaacagatccccaagattacccacttgttaaaggtctgctatataacgccaccaccgccaccttagctaacgcagaaactgttgagcaagagcattttattaatggattgaccgccgacagcataaaacagccggtaaccactattccggcaatcagcagtgttacgcaaccttgggcttcttggaatggtcgcccgcaagagagtgagcaagccttcttaacacgaatccctgtccggttgtcccatcgtaaccgagtgttgagttggggaaatatggtcaccttactaaaggatcattttgtcagcctacttgatgtcagacaccattcaggcagtaaattgactaccattccggcaccggaagagcaacaactgatagttatcccggacagccgttacaaggataatgatgatgcgttacgcccaaaattgaacccggcacgattggctgagatggtcgaatggttaagtcaattaagtagcccttgggcaaccattgaaatcaacaatcctacttatgttgatgttaatgtggactatcaagtgaccttcatctctggcgttaattctgactatggccaccatcagctacaacagcaattaaaccggatatatatgccgtgggcggagaatcctgctatcggcgtgacgaccggtaactgcattgactattaccagttattagccaccatccaacaatcccctctggtagaacgtgtcaccgatttaagcataaccatagctaaccgaactacgggtgacgtgggtgcaagtatcgaagccaacgatgacgaagtgttgattttagtttggacagataagcgttctttaaaccaaggagttaacaatgaataatcaggatgctctgtttcccatcgttaaagacgatattgcctttgataccttacttgctcaggctaaggctgtgattgagcaatattccggtcaatattggagtgatatgagtgaaaatgatcccggtatcactttattggaagcctgttgttatggggcgtctgatttagcttatcgtcattcgttgccacttttggatcttcttacgcccggaaaagaggaacaggcacccggtgatggtattttccctcaagagtttggtccgcagcagatgctgacctgtggtccaattacactagcggattatcgtcgggcgttgctggatttacacagtggcgatacggttgagggttactttttatttaatgatgtactactgatatgtgaacctgacgatcagcgctatacatactggtatagcaaaaagaaacgtgaatacagtttcatgcaactccctgattcagaaagtaaacaattaacattaagaggaaattattggctttatttgctgcctagccgggaaactcaggccgataataagctggctcaggagaaacttaacgctttcctgaaagataaccgtaatctgggggaatgggtgagtcgggttatctggttaaaacctgttgatttgccattgaagattgatattcagcttgataatgatgttaaagatatcgctgacgtatttgctcaaatttatatgacagcggaacaaacggtgcaggaaaagccgctacgttataccactcaagcaatgaaagagatgggttacagtaatgaagaaatttttgatgggccttatttgcatcacggttggatacctgaattaccgccgaccaaagattacaacggtgccatagtgttaagtttaagccatttggttaaccaattattggctatcaagggagttcaaggtattactcggctggaattagataaagataataaggaaattatttctctgctaccgcaagataattggtcttgggaaattgcaaaaggatattatcccagattatggggcagtgatcccttaaaattgattacctcaccaaacagtccattgaatattattgccaaaggtggcgtgaaagttacggtttctagcgaagaaatcaagaaaaagcttattacagaaccgttgattaatacacaaccggaattattgaactggggtaagcatcgtaaagtgcgggattattacccggtaagcaataaattacccgcttgctatggattgcagactaataaacatagcttacaacaactacagttacaccaatttatgttgccttttgaacaactgctagctaatggctgtgcagaacttgccttattgccaaaactattggcgtttacacaacggggaaatacggtatacggtgcacaatggccttttaaagttaattccgttagtcagaacgttcatcaggcgataatgcctgacttaattaagaaactgaatgatgatgggcaaattgagaacgatggtggcatccatgagcgaaactatgcaaaagagctagctatccttgaatatctgttaagttattttggtgctcatcgagcggccagaccacttattctcaatccacaggattttttatccactcagcgcggttatttggctcaacaaccagagctggcctatcatcgtaataatatttgtattgataaagtatcggcgttgcaaaaacgaattgccgcccggttaggcttgggaagaaaatgttttaatgaaccgcctgatttggctgatctgcctttctatttaattgagcatcgtcaattgttacccgtgaaacctgatccggtattcaatagtgaacaaacacctgataatctggaaattaaagatcatcctgattctaaaagccatcacttaattattactcagcaaagtacggcagggcagttattgcatggtcagataattgacttaattgttaaaggtgagggcggattcacattacggggccaagtgatcacggaaattacagaaaaatcattttatcttgatacccgtaacagtgttgctctggaatacaatttggacagagtacaacaagcgtttatcgataaaaaactatgctggcaaaatagcccggtgtggttggaagatatggattatcaattggtttatgccgatgagacagatcaaatcgatgtcaaagatgaatactggatcacttccagtccccaaagcccttttccagccatgattaaagaaggtgatgaaatcacgctaaaatataaaattaccccttatgaaccaaccaaaaaaatagtagctagcatgaattctccatctgactatatgcttaaagctgtggtaaagaaattcgatcgtattgagggtaaaatattaattaaacgagataaagacaatgaggctgcttttccacaaaaggaaaatgcatggcgttatcgctggtatttctctggtgcagaatacgcgcatactgatcgtttctcatttgtcgtcagcgtagtcattaatcgtcagttaattgaaaatagcaaagttgatcctcataaattggaatcatgggtaaaaactgagattttaactgaatttccggcacatgtttccatgattatccattggttacccttagagcatttcaggaattttgccagcacctataaacattggcaaaataacggttctgctttaggggatgaagcataccatattttggaaatgttaacgttaggtcgtataccttccccattaacgggaacagggaatatgagaattgctactgaagaacaaagaactgaggttattggtgaatctgaaacagaatggcattctggatttattgagagtaaccagttgctgtatataccgaaaattcaggaagatattaatcgtaataaaggggattaatattgtattgcaataggagatacttattgcactattaaattcattgtctttaatgattatgtcattatacagtngtaattttaggatattagcaatagcatagactaatatatataaggtgataaaaatggaaaagaaaaataatctatctaattcagagattaatccagaaaataccaataataaaacagaatctccttcggcggatgatttaaaaaaacgctttaaagcaggtagtattccattgcaaactgattatgaacgcttgattaatatggctgatattggccgtaaagcagtagggaaagcaccgcaacaaaatggaccaggaataggattgaagttggatgataatggtacgcttaatttaaagataggtactatccccgatcttgccgataaaggcttttctccattaatgttaaaaaatgatattttatctgtagaccttggtagtggtttgattaataaagacaatggaatatctgttggtcaaggtaatggtattgttgtaaatacagataatatagctgtcaaggccgctaatggtattactgttgatggtagtggtgtttcaattaaagcgggtaatggtatttcggttagtggaaatggagtagaagttaaggccaagaataatggcagtatttctgtcgagccagatggtatagctgttaaatgttgggacgggggcggtattgtggtaactgataataccggtctttatttgaaattagagggaggaaatacaaacaatgcttggagtggtgtaagtggtttgagcctgagtaaaaatggtgtaaaagttaaagcgggtaatggtattaaggtcgatgataaaggtgtcagcattgatcctaacaaagtccttcctagaggaatgattgtgatgttttctggtagcagtgttcctgagggatgggcattgtgtgatggtaaagataataggcccaatcttattgatagatttatcatgggaggtacaacacagaatattggtggtaagtcttcagattcattttcgggcgctaaagacaataaaaaattcacgttcatatcagaaagccagaccgttcgtatatcaggaagtactgacggacatggattaactgctgatgaaaatggtcctcaccaacatgagcaaggtgaaactctaaacaggcaaggtaagtgccataatggctatacagaagataatactgatcgtgactgggttgacggtggtagacgaggtcctgagccacctaattatagggcatacacatttccaagcggtaagggaaatccacactctcaccctataaatctgaccagcggtgggcataatcatagcaataatgttactgtgccgtattatatattggctttcattattaaactttaatatctatgaagaaattgagagtttaaattatcaattaatctcaaagagagtactatttatgatttcggagaaaaatttgttaaatcgaattactattactattgaagctaataatcaacaaggagctaaaaaattattacatggttctctgctcaatcaaatcggtgtacgtaaattatttaatttatattttaataaacatgttgttagtcaggatatctatttggataaattaacgctgaatcttggtgaaattaactcacctgattttaattcattatttcctattcgtcttaattctgaattaaataaatcattagatcaatattgtaaaaataataaggaaaaaaccattacagaaaattcaataatatccaaaagtgccggtaagttctctttattacagagtgattatttatctaatatcgaggaatttatccagtatttatatcaaaaagatattaaattaaatcatgaaaaagcaatggagagtaataggaatattaatgttaatgctgagtctttaattaatcaattaatgagaatagagaaaaatttaacattattattagcaaaaagctgcttatctgagcacggtttacaacggcttttagctatcagccagccaactttattaagcgaaattaatcacaaattatcggagaatatagatagatctcagcatcaaggaaaggtagttacctcttggcaattggtcttgaatgcattgggatatatacagcggcataatatgcaggaaatacctaaaccagatataaaagtgatatcatatatcatggctgaatttgatagcagtatgcttgatattgtgcctattattaccttatttcgccaaaatataatcgctgaaagtaccttattaaatgaatggttgaagccaatttggcaaatagaatggattccaaaactgtgtaaaaaacacctctctgttcaggaatataaaagtttagccaatcgttttggctgtgaaactcagacttttagagaacaatctttacagcaaacagatccagttaattcaatgattactgagctattactgaaattatctacaaaacatcgggaaaatttaccaccattaagtcagcatcaactttcatcaataactctttcattgatcactacagcgattcaaaaaggagaaataaaagtaaaaaatatcatccagttattgcaacatccagcgttatataaccaaacagggacaacttggttatccccactatggcaattagactctgtttcacaactctgtaaaaaacatctctctgctgaagagtataacgaactgtcgcaacgttttatgtcaaataatgccaatcaagcattaatccctcaagatcagacaatattatcaatatcaaataattttcacgtcaaagacaataattgtaatcaatatcagataagtaatgctggaatattaattctatggccgatgttacccgctttatttaatcaactagatctacttgaggagaagaagtttattcatcagcaagctcaatttagggcggttgatttccttgattatcttatttggggagatgaagagggtctggtagagagaaaaaccctaaataaagttttatgtgggctaatgattgatgaagagacgcaatcaattcttgttgaaccagaaaaacagttaataatagcacaatggttggatgtgattatcgctcaacttccgggctggaaaaaactgagccgtaatgatgttcgccaactgtttttacaacgaccgggtgaattactgatagataaacaggaaatcaaaattacgctacaacatcagccatttgatctgttattagctgactggccgtggccgttaaatatcgtcaaactcccttggttaaatcgtcctttacaggttgactggcaaaatatttaaaaggtctatatgaactctttacttaaaaatagtcactacgtggtgacggaattacattggatttatccccatctggagcgtatcgatctgctattacagcgctattattatcaaaagagggaaaggtacgattcattaccggagagttttttacttactgagaataaggtagaggaatatttgatacaaccgcaaggctttcctcattggctatttgaggagggtaatattgttgatcatccgaaaaccgaagaacattttgcttctgatgcgctgtctttattggttgaacgttttgaactcacggaatttgagcgtgatgtcttattactcggtttattgccacattttgacagccgttatcatgcattatttgctgctctgcacggtaatagtaaaaaacagtggcctggctttgctttagcaattgaattatttagtcaacgccacagtgattggcaattattgcaaaactgctttttaccatcctcaccattaataaggaaccaactattacggctcaataaccacgaagaagctatctggttacaaacgcaatttttaacccacagcgccgtctggcattttttatcaggacaacaggtaatttttccgcccctaataaattgtgcttattggcattctcctacttcgaacgtttggtatccatcaactctttatcattcatttgaaaagatattattgaatgaaactgatgaaattcgcccgttggtgatactgagaggaaaacagggcagtgccagagagttagcggttagcaatattatggcgtttcatagcatcagtactctaattttggatttagctcgattgccagaggaagagaatttaactgtaatagctagtttgctggcagatgcagtgagagaagcacggttacataatgcttgtttattaattcgtcatttttctttacttgcagatgaaaagaaaacattgaataacctattatccattttgctgcatcaacccaaattaccggtggtttgtttagtagagccgggagacgcattagtctggattaaacatttatcaatggtgcaaattgagatgccggtagctacacgggtggataaagaatctatgttgaaagaatgtttaccggataatgccgctcagaaagttaatcttgcacaattgtgtcagcgtttctcatttaccgcggaaactttaccgttaattcttaaagaagcttatcaatatcaaatattacgacaaccagatgatcaattagaagagatagatttacgtaaagcattaagtttccgcgctcaacagaatttaggtaaactggctcgacgaataacgccaaaacgtaattttaatgatttagtggtttctgatgaattagctcaacaattgaaagagattattgcaacgattaattaccgtgaccagattttgggtgctggctttcaggaaaaagtaggttatggcacgggtattagtgcactgtttcacggtgaatcgggaacgggtaaaacgatggccgcagaagtgattgccgggcatcttggtgttgatttgattaaagttgatctttctaccgtggtgaataaatatattggtgaaacggaaaaaaatatcgcccgtattttcgatttagctgaatcggattccggggtactgttttttgatgaagccgatgcactgtttggtaagcgcagtgaaaccaaagatgctcaagatagacatgccaatattgaagtttcttatctgttacaacggctggaggattatccgggattggtgattttagcgactaataaccgtagccatttggatagcgcttttaatcgtcgttttacttttattacccattttacttatcctgacgaagtattacgtaaaaaaatgtggcaaactatttggcctgaacaactgaaattatccggtgaaattgattttgcacatttggctaaacgagctgatttgactggggctaatatcagaaatattgccttattggcatcaatattagccacagacaataatagtgaaaaaattgagcatcaacatatagagcgggcagttattctcgaattaaataagagtggcagactgattttttaaatatttattaaatttggagtcgatatgaaagataccattgaacctaacaatgctattgtcgaagttaataatgcattaaaagatattctatctcgatatttaaataatattgatattcgttttgatttgccagatatagattcaattccatctaaaccgacaataagtgtatttctttatgatgtacatgaagatttgcaattacgctctgctgaaccgaagcgttataatcctgtgactaatttattgttaccgggatgggtcaatattaattataattatttaattacttactggcattcgaataaaccctcagttgatggtagtagcccggatagtcagcctgataatcaggcggcaaaaataatgacctctattttgaacgcgttgattaatcatcgtcaattacccaaaattcctggtgcctacaccaaagttattccaccacaggaaaatttaaatagtttaggtaatttttggcaggctcttggcaatcgacctcgactttctttattatattccattaccgcaccggtgaaacttcaagatattacaaatatagtagagccagttatggatatttcccattctgtggatcaaaaactgtatctgactagctcacaaatatgtcaggaattattagaaaaattatgtgttgatttaggtggtacggaagatatacgtttggcactgactaaagtgaatctaacaattgaaccgcttgtaccagccacaggcaataatgaaaatgaaaaaattattcttgaggcttcaggtattactttttcaacctattactctaaaataaaagagattctttcaacatgggtaaacagtcgtaaagcagttgttaagataaatggcataggtattattgttgataaagtagattttaataaattaattagcattgaaaagtaattacttaattaattacccataataagatggcaagtaatagaagataacaatatttttattgattgctttatataaaaacatcttgttattagtagtgttttaatctatatattacttacttataactcttgggtgatgatattatgccaatcagcaatcttgcaaaagaatctgaagttcgtgccgtaaaagatataccctgtaaaaatatagaaaccgataatcatctggaaataggtctttcttctggcttatcgagatcaaaggatacctcaaaatttaaaaaaaatagtataaataccataaaattgatagatgatattatcgcactacataatgatccgaaagggaataaattactgtggaatgataattggcaggataaaatcattaatcgggatttggcgaatatatttgaaaagattgatgaaagtgtttctgaattaggtggtcttgaaatgtaccaagaaatggttggggtaaatccttatgatcctactgagccagtttgcggtttatctgcccaaaatatatttaaattaatgactgagggagaacatgcagttgatccagtagaaatggcccagacagggaaaatagatggtaatgaatttgctgaaagtgttgatcagcttagtagtgcaaaaaattatgttgcattggttaatgatcgtcgacttgggcatatgtttttaattgatatcccatccaatgatcaggaaacagtgggatatatctatcaatcagatttaggacaaggggcattacctccgctgaaaatagcagattggttaaattccagaggaaaagatgccgttagtcttaataaattaaaaaagttgttaagccgtgagtttaatctattatctgatgatgaaaagagagcgttgatttcagagacgcttgatatacataaagatgtatctaatgttgagttggatagaataaagagagatagaggggtggatatttatttaaccgaatacgatgttaataacttttatgaaaatattgaaacattaaaatctaaactttctaattatgataaaaaattgagtaaaccaaaatgaattgtgttatctaaatattatattaggattgtcagaataatattaggtaaatcaaagtcttggatatacccaatggatttcaagatagatcgtgacggcaatggaacgaatccccgggagcatagataacgatgtgagcggggtgagtgcagccaacaaagaggcaacttgaaagatgacgggtatatttatgcctaaggattctgtgagtcactttatcgtagaagatttaatactccttaggcaaggagtgtctttgtgtcatgagactatttatagatagatttgtaaagataaaataaaatgaggtgatttatggaagcatctgaggattgccagtaaatattattgtaaacgatatggttgctatgagttcatttattagttgaatcctcgtggttataagaattttatctttgaaaaggtagaggtgattatatgtatgactcgaaaaaaaagaatagtgaaccaacaacaaagaagaaatttgaaagaagtaattatagtcaatgggatgacagcattaaccactatgaagacatgaatcgtgccagaataaaaaacagaaatgatatattgaccactgttgattattttggtgaaaaaaagaagacaatgcatacatttgaataccagtcggatattaaacatgatactaattttaataataaaaataagtcattgtttgagtctttcgctgcatcatttgttttacaaaatccatcttttttttcaggtgtaatagataaattatcaaaaaaattattcaatataatatctaagatcgatgaaagaaataatttccaaaaaaaactgtacgattttattgaaaaagatacgagtccagagggccaatttggccgatttactctaggtaaaaatgaaatcttaaatgtattgcaagtaaaatcggatactcctcaattatttgttaaaaaaatgctattaataaagtctttgggagcttttattattgatttttcctcaaaagatattggaaattatgattttatctttgatggaaaagggagagaagtaaatgatataatagaaaaaaacagaccaactaatctttttaaagttagaggaaggaccaatattaagagcagccaacatcgttcagatataggtattttagatactccaacctttgatagtcttacggaagagcaaaaatcatttttaaccattccagaacttacaaaacgtagaccactatttagaacatttacacatgaattggatgctgaggataaaagggtcgtagagtcagtgtttgttaacagaacctttgattgtgattctccattaataggatccgtatctggtagtacatcttgtgttttagttgctgctgatattttattccctgatatgactatggtggaaaggaagaaattagcaatagcaacctttgcatttttagttggtggaggataccattcagcaactgaggtgtttgatgttgcctatcctggattagatttgaataaagaaatagaagagttgattgagaataacccgatccaagaaaatgctggtgtggctaccttacggcagcttatcggaaacagtggtttttaaggacaatgatagtgttgcgtgccctatattgcagttgtggctttctaagattaagaaataaaactctgtaagcgtcgtaggattatcaataatctgattcagcctcccatacaagagaggccgaattaatatcgctttattggtgagtaggcgtctataacaccagatccaagatgatgacaccacacaagccaatcgcccatgcaatagtggtgggtattgaccaaacgaacatctgttgtttggcatctttgattcccatcatgcggttaacgacccagaataggctgtcattaaaataaccaaagaataatgagcccatcgttgctgcttgtgcggcaaccagcatgttgatccccggaatttgactaataattggcgcagaaatagaagcagcagtaatcattgccaccgtgccggaaccttgaattaagcgaaccagtgttgcgatgataaatggaatcagcaccggtgttagtgggagagtggctatatattgcgccagaatggtgccggtaccactttcgcgcaataccgctcctaacgcaccgcctgcgcctgtcaccaataaaataataccggcagcctgtaaaccttcttccagacggtcaatgacttcatgtttattggcttttggcatcaaggtataaaccgccaataatacgctgatggctaaagcaataacgggtgcaccaaggaaatcaaatgtctgaaaatagaagttgttttcttgtccagtcaaagttttagtgtttaataataggctattaatggctttaatgaagatcaaaacgatagggacaataatcggcagcagggaaagaaataggctcggtagcggtttgttcgctttctcttccatgtagcgttggtggattgtttgtagatcttgcgcttcttctgcttcatcaatgggttgaaattcaggatattttactgctaaccatttggcataaaatacaatgccaataacgcaaggcaccgccagaaccataccggttaacatcatggcaccaatgtcgacaccgaaaataccagcaacccccagtggccccggtgttggcggaacagtgtggtgggtaacaaccaatccgccagccagtgccacgccaagcgttagaagatgacgttttcccttttttgcgagtgcttttgccagtgggtagaggataacaaaggcagagtcgacgaaaattgggatactgacgatataaccggtgatcgctaatgcccactcttcgcgttttttacctaaccatttgataaagctgtaggctatctgttccgcggcgccggaaacttccagcacccgtcccatcatgacccccagaccgataacaattccgatactgcccagtgtggagccaaaacctttagtcataacatcaatggtatttgctgcggttaagccaccagagagcccagcgatcgctgctgcgatgagcatggctaataaagcatgaacacgggtacgtagcaccagaaagatcaacgtaaatacggctacacccagaccaacgaccggaatgtagtgttccataattagcctccagtttgggacaggttattggtaataaaggcacggattgtatcactgaaagtattatcagcatgaaaacccagtgataagccacggctgatatcgaaatgacccggccaactggcaacaatacggttaatgttttcgtctggttcgaagcggatgagttccaccgctttctgcccggcaacctctgccagtgcatcaatcatctcctgaaccgtgacactaatacccggtaaattgactgtgcgggaaagaccaaatttttccgccggaatttgaaccgcatgtataaagttgtggatcacggtttcagggctggagagccataaagtcagatcgcgagaaactgggcagatgctgctttctccgtgtagaggttcacggatgatagcactggcaaaagaggatgctgctttgtttggcttcccagggcggatactgattgtcggtagacgaagaactcggccatcgacgtatcctttgcgggagtaatcgttaatcatcaattcacacatggctttctgtgcaccataggatgattgaggattaaccgcacattgatctgtaatggttgcgggtaattctccaccaaatacggccaaggagctggtgaaaataaatttcaattttggatttttagcccgggcaacgtttaataagttgcgagtaacatcaaagttaacttgcaagccaagatcaaaatcgctttcagcgtgactactgacaatggcggcgagatggaataataccgtgctgttttcatcgatcagcttttccgcagcccttgattgagttaaatccaatgccagacactggacgcggggatcattaaccggtgagacagggcattgaatatcggtcaatataagttgatcgaaatttaatgtttgatggttgtttagcaaagtgctggcgagttgctggcctagaaaacctgctccaccagtgattatgactttcattgcgactctccttgtttaatagctttggttatatatacccgtcatctttcaagttgcctctttgttggctgcactcgctcaccccggtcacatcgtttgctatgctcccggggattcactcccttgccgtcgcggtgcatcttgaaatccatagggtatagggtttttatccttatacgctgacagtatgtaataccaggttgtgttctcgtaattgttgctgcactttcggcggaagctggctgtcacagacaatatcatccaaacttgcaagcgggcagacccgaaacatgccgtatttgccatatttactgctatcagataccaaaacacgacggcgggcgatttccaatactgcctgtttgactaatactttttcttcatgtggcgtggagacaccatgctctagatcccatgaactggtgctaataaaggcaatatccacatttagattgcgaagcagcatggcggcgatagggccaacacaggaatgatttctcttatctacctgccccccggtatggaacagatttaattggggtttgttcatcagatattgggtaatggaaaaatcgttcgtgatgatagtgaggttaaaacgctcagccaagactctggcaatttcaaacgtggtggtgccagcatcaagatagaccacttgtccatcttcaaccatagagactgcatattgaccaatttcccgcttatggcgatgattaagctgggctttttcattccaaggcaattcctgacgtaaaacatcactaagttgcacaccgccactgacactaacgacttttccttcttcctccagagtgtggatatcccgccgtactgtcatatgtgagacattcatcagtttaaccagtgtactgatagaaattgtccgatattcgtgtacatagcgataaataaagtccctacgctctgatggaagcatatcttctcctgattatttctgtgctttggtcaaccaatccagaccctcttcggtgtaacccgcagggtgatattcacagcccaaccacccttgatagcccatttcatccagtttgttaaatagccacggatagttcacttcgccgctatcgggttcgtggcgttcgggcaccgaggcaatctggatgtgactgaatttgtcccatagacgttcaatggtgcgtagcaaatccccttccataatctggcaatgataaagatctagctggataaaaacattttgacggtcaatttctttgagtaatgtttcagcttgatgctgagttgtcagaaagtaacccggcatatcacgcgtattaattggttcaattaatacgttgatgttatgttctgccatcacatcagcggcatatcgaatgtttctgatataacactcacgttgttgttctggtgtgaagtgttcatgcagctttcctgccatcgcatgaacttgcttgcagttcagcgccagtgcatatttcagcgcggtttgcacaccggcggcaaattctttttcacggccaggcatagaggctattcctctttctcccgccgcccagtctccggcgggcatgttgaatagagcttgggttaattgatgctgttttaatagggcagcaagctcttccgctgcgacttcataaggaaacagatattcaacgcctttaaatccagctttggctgcacgggcaaaacgttctgtgaaaggtacatcattgaacatcatgctcaagtttgccgcgaatttagccatgacgaattccttgtttgttcactcagtttttgggtaacgagtttcaagttcttggacttgctcttcatttaatgtcgtgaagccgtgtggcaataaggttaaatagagccgtgcggtatcttccaattcttctgcgttgaaaaaagcttgccgtaaagttttgccgccgacaacaggtccgtggttcgagaggaggattgcgttgtgttttgcggccagcttcgcaatttcttcaccgattctttcatctcctggtggcagatatttgaccagaggcagttttccgacccgcatgacatagtagggcgtaatcggaggtagacagttacttctatccagattggataggcaggaaagggcagttaaccaaggggaatgtagatggaccaccgcatggcattcgggacggttgcggtacatggccaaatgcatggaaacttcttttgtgggtttgtcaccggatagccaattaccctctgcatctagcttactcaggcgattcgcttgcaagtcaccaaaactggagttggtcggcgtgatgataatcgtgccatcttccagtttggcgctgatgttacctgcaccgccactgctataaccccggtagaacattgaacgagcccattcgactaactctgaccttagtgcttgttcactcatgaaacatctcctgtacatgcaggaagaaatcgatattgccgaagttacctgatttcaatgccagccaataattgtgttgtcgatcgtgtacccaaggtactccgggagcaatgggtgcaccgatactgaattgttggatgtccaagctttgtactatcttaccggcagtctcgccgcctgcgacaataaaggtattgaatcctagctggctcagaccttttacaacgctggcgaaggtgttttctattgcttcactggcagtagttgcaccatattgttgctggattttctgtaatgtttctgggaggtgagtggtgtatagcatcggtgccagatagttttcggattgctgaataacccacgcaaccagcttttcggcatattgtggatcattgatgcatgaatcaatattcagggctttagttggagcgaatttctggtatagagcaacttgtttgttggtcatgacggaacaactgccagaaaggatcacggtgcgtctattctcggcgggtggggttgctccttccggttggtatggcatcaatggcttaccggtgtctgtgctggcaagggcagcaccaagaccagagccaccagtgattaatttcagcgctgatgccgctctggcaataggcagtaggtcattcatggagagggtatctgttattgcgtagcgtatgttttgttgttgtaaatgatttagccttacgcggattgcctgctcgccttggtgtacacatgccagatccaccagatctgctttcccttgagcttgttgttctattaggcgcagtagattggcatctgtcattggtgtcaccggatggtgctgcataccactttcattaagtagttgaccgttgacaaatagatgcccatgtataacggttcgcccgttaacgggaagggcaggggagatcagcgtgatgtctgtttgtagttcatccatcagggcatccgtgaccggcccaatattgcctttgctggtagagtcaaaagttgagcagtatttgaagaatatttgttgacaacctgttttctgacgtaaccagcggcaggatttcactgcgttattcacggcttcgtctatcgggcaggaacggcttttcaggctgataacgatagcatcaatatcctgtggaatggcgatattttcatcaggtgtatccagtaactggacaactcgccaaccgctttgtgccataaaaccggcgatatcggttgcgccggtaaagtcatcagcgataacgcccaatttaatggtcattattttttctccggcaaagtgatacctttaaatgttttgataaccgcgctgtcatcccattggccgaaaccttcattactggcagtaaggaacatttgatgtgcagtggctgataatggtaatgggagtttcagatctctacctgtttctaagactaatctcagatctttgacaaaaatgtctacggaggatttagcagtgtaatcccctgccagaatatgggggacgcggttttcaaacatccaagagttacccgccgcgtgggtgacaatgtcgtacatcagctccagagaaatgccggctttggccgccaatgccatactttccgctgcggcagcaatatgtataccggcaagtaattgatggattgttttgacggtagagccttgaccaatttcatttccaacatggtagagacgttcggtggtggcatcaaatacgggttttagttgttcaaataatgcgggttcaccggaagccataacggtgagctggccttgttcagcttttagtgcgccccctgaaataggcgcgtccagcatgtttagattgtgttggctaagacgatgggcaaaatctttagcctgttctgcggcaacggtactgtgaagcacaatgatcgtaccggcttttaactggttgactaacggtgtttcgccctcaaacaggatgctttctatttgagcaccattgacaacaacaagtaagatagcatccagctctgatgcccaatttgctgcgttgtttgtcgccgctttagcgcctgcttgtagtagttggtcacaggctttttggtttaaatcaaatccatacgtgggaatgcccgcgcgtattaacgcgcgggcaattcccatgcccatagcccccaatcctataattcctattttttgtattgattggctcatggtggttccctggtgttgttgttataatttgttattcttttatcattatttcacacgtcatttcacaaatacacgatggttatcacattctaatgcccgctgtttgaaggtggttatttttgtaattatttgatttatattatttattgttgatttttgcgaaatgttaaatttcacataaaggtgtgataagaaatatcattgtgggtacattaaggttgggtaagcgcttttcactgaattcttttaaagatgttagttagtctctggaactgttaagggtaggtaatttaggagcgttgctgtaggttgtctgtttttggaggaatcaaggggtataaacgagaagtatgtttttattgggtttgtttgtaaggcttgaaggatatttatggtggtgggggaaggattcgaaccttcgaagtctgtgacggcagatttacagtctgctccctttggccgctcgggaaccccaccagattttgaaatatatcactgttgctaacagtggccggaatcataccaaatgagccgccgctgtaaagtagatatttaaaaataagtgacgatatgctgattttccatccttattgatcttgttgtgagcaaagaagtggtctgtttgctggtggcgggggaaggatgactcgtcactgcgttcctcgccctgcgggccaacgcgtcgcaagcgccgcattgttgtttcgctgcgctcaactcgaaccttcgaagtctgtgacggcagatttaccgtctgctccctttggccgctcgggaacttcacccgattttgaaatgtatcattgttgctaacagtggccggagtcacatcaaatgagccgccgctgtaaagtagatatttaaaaataagtgacgatatgctgattttccatccttattgatcttgttgtgagcaaagaagtggtctgtttgctggtgacgggggaaggatgactcgtcactgcgctcctcgcccttaaataaggttatcgaggttattttttattgatatttggagttattggggttatgatttttaccaagttaaacagataggagttcttaaaattattggaggagtataacgtgttatatcctattgcgattgaaattggtgatgagaaccacgcttacggcgtggttgtgcccgatatatcaggttgtttctcggcgggtgattcaatggaggatgcaataaaaaactccaaggaagcgattactgggcatttagagttattggccgaaatgaaccaattaccccctgaagcaaagtcattggattactggatcaaagatgaagaatacgcagggtgggcatgggccgtaattgacattgatgttgaaccatatttaggtaaatcgacaaaattcaacgtcactctgcctgatttgttatcaaagaaaatcgatgatcaagttaaagcaagcccaaacttgtacaagaatcgtagccactttttgcaagtggctgctttgcatgaattgcaaaacagtatttagcaataatgatgatcaatcagcctcatattttttatgaggcttaatttaatgagggcgtttaaatctgtacttgtatatgtacatgctacacgtaaggattacatttcaaattcaactggataatccggctctccttcaaaaccacgtcctttgtaatacagaagctctcggttttctttactaagaggaaacggccggaccgaccagacggtttagatgagccgcttacgattttccatccttattgatctggttgtgagcaaataagtggtctgtttgctggtggcgggggaaggatgattcatcatttttgaaaagtcaccactactgcttacagcggccagaatcacatcaaatgaactgccgctgtaaagcatatgcttgaaaataagttaccgtgtcctgtttttgggcctcaattaattcagctttaaagaattacagtacggttgccgtaaacaaaaacccgctgagcaagaacccaaaataaagcatggctcagaacatttttttcaacatcccggcccgctctcatcatatcttcagccgtgtatgtgtggtctatgttaatgaccttctgagtaataattggaccttcatccagattatcattcacataatgtgctgttgcgccgatgatttttacccctctctcataagcctgatgataaggacgcgccccgataaatgcaggtaaaaaggagtggtgaatgttaataatctgatttggataatgttggacaaattctggtgtcagtactcgcatgtatttagctaataccacgtagtcaggtttgtattggtcaatctgggcaatcagtttttcatcatgttgttcacgggttaaaccctcgtgactgattaaatggaaaggaatgccaaattgttcaaccaatgattgtaatgttgcgtgattgccgataaccgccgcaatttcaacatcaagcccgtcataagcgcttttcatgagcaaatccccaagacaatgcgcttcttttgtcaccataatgacaatacgccgacgccccgcactatttaattcccgttgagaacccaccggtagtgcatcatctaaatcagcaagcaatgtctcatcattgaagattccttcaagctcagtacgcataaaaaagcggccagtacgatgatcgacgaattcattattctgaactatattcagttggtgtttgtagcaaatattagtaattttggcgatcagtcctttagcatcagggcaaatagtgcgtaaaattttcttttgtatatgttggtgttgcatggatgggattatccttaaatattttgtgtttgctgtttatgggccttaaccacaacattttttgtattttttacccgaaccacatgggcaggggctattacggccaatttgaggttttatgccatcaataggttttacgccatcaatatagtaccaatgctggtctatacgaagaaaacgtgaacgctcatgaataagttgcttatcttgggatttctgatcaagaaagcaagctgaaaattcaacataggcttcgttatcattttcgcctttttcagttgtaatgacattgagtccgagccactgggtaacaataaaactctgttctatatctaaacgccacttttcagcctggcagtcaggatgccaactggtaattagataatcggcgttgtgctttacataggcactgtatcgggaacgcatcagtgattcggcagtttgggcaaattttatgttttggagataaggggaacagcaatccgcaaaatctattccactaccacaaggacatagctctgtcaaaattaactccaattgtaaagggtgaaataccatttttatgggttttctattgcaaagaaacgtaagagaacaaatgatagtcacttaattgaactaatatgagtgatagtacctaagaaaaggtgaaggtcgcaatattaaggtaagggagcgtatttatggaaaaggcattggcaggcaaaaaaattctgattgtggaggatgaacctgttttttgttctttgctggcagggtatttgcgaacgttgggcgctaaggtattagtcgcatctaatggcgctgttgcactacaggtgctaggacgcgaagctcatgttgaacttattttatgtgatttagatatgccggttatgaatggcattgaatttattgcgaaattgacgaatgagggtattagcattccagttattattatttcagcgactaacaagatggccgaaattgatgaagtgcttcgtttgggagcaaaagatgttttattaaaaccggtttcagatcttaatgagataaaaaaatcggtgttggcctatttacatcctacggtctttatgtctggtgcgattgaacagaataacttgaataaagattggttaaccctaaagcataattcggatgaagcattaaatatgcttaagcagttacaacccccagtttctcaagtgattgcccattgtaaagtcaattaccgaaaattaaatatgattgataatccagggttaattctcgatatggcggcgttatctgacaatgaattagctttttattgtctagatattagccgttcaaaagagtatggtgtgatttcagcattattacttagagtcatatttaacagtttgttacaagagcatatcatccaccattcccggcgtttacccaatatggcagctattctaaatagaattaataacttactggaaggtgcagggttacaagggcaatttccattgctgcttgggtattatcatacgatcaataaaacggttctgctcacttccgcggggttacatgccagtattaagtcgggtaatcgccaaatccaattagacagtggtgttcctcttgggacattgagaacgatttgttcgaaccaagtttgttctcatagtgctgaatggcaatgtcggatttggaatacaaatagtcaaataaatctgatgctttcttcaatgtattctgggtgaatattcccaaggtggaattttgtttaaaatggattttaaacatcaagtcacggtaatgtaattatacagaatggtgatgtttatcgaagagaattagctggtatactccgcctattatgcttggaaatctatctaatcaggctattttatttgccgctctttagtacaaagaacggatttagcactgctcagatgaaagtgataactttttgagtggtcagaagggtgaacgaagccgtgaacttttgtatgcattggttcctgcgtgctgttcgtgtgcgcggtttattgacacaaaataatcagtaatagtgatgccttattaaagaattggcactgattttgagttgaagacagatttgtttcagccaaaaaacatcgggagaaaggtaatgccattagtaaacgaaccattagtagaaaaatcattagtagaaaaagtatcagtagaaaaaacatcagtagaaaaaacatcagtagaaaaaatagtaaaaaaagccgttattcccgttgcgggcttgggaacgaggatgttgcctgctacgaaagcaattcctaaagagatgttgcctttagtagataaacctcttattcagtatgttgttaatgaatgtattgccgctgggattaatgaaattatcttggtgactcattcatcaaaaaattcaattgaaaaccattttgataccagttttgagttagaagctatccttgagaaaagggtgaagcgtcaattattggacgaagttcaatctatttgtccaagtcatgtcaccatcatgcaaactcgtcagggaattgctaaaggattagggcatgcggtgttatgtgccaagcctttaatcggtgatgaaccttttgctgtgatactgcctgatgttattcttgatgaatacagtacagatctgaccagatataatctaagcgaaatgttggttcggtataatgaaacgggcgcgagtcaaatattagtagaacctgtacctcatgaagaagtttctagttatggtattgtcgattgtcagggggaaaatcttcaacccggtgacagcaaactcattaagcgcgtggttgaaaaacctaaaccgaaagaagcaccatcaaatctttctattgttggccgttacgtattgtccgagaaaatttggccgttattagcaaaaacagcgcccggtgccggtgatgaaattcaacttactgatgcaatcgctatgttaatagaaagggaacctgtggaagcctatcatttgcagggtgtaagccatgattgcggtaataagcttggttatatgcaggcatttgtccggtatggtatgaaacatcatgctttgggcaaagaatttacggattggttagtggcgttgcaggatcaggttaaagaataattttacggaaatttagggattatatgaaagttacggtgtttggtattggctatgttggcttggttcaggcggcggttttagctgaagtcggtcataatgttctttgtattgatatagatgcaaataaagttgaaaatttgaaaaatggccaaattcccatttttgaacctggattagctccactggtgaaaaaaaattatgaagaaggccgtctgaattttagtacggatgcaaaggccggtgtggcacacggtaaattgcaatttattgctgttggtactcctcctgatgaagatggttcagcagatttgaagtatgtgacagcggttgctcgtactattgcggaatatatggatagctataaggtgattatcgataaatctacggttcctgttggtaccgcagataaagttaatgccgttgttaatgagactctgcgtcaacgtaatattgatattccatttgatgtggtttctaaccctgagttccttaaagaaggcgcggctgttgcagattgtatgcgccctgaacggattattattgggtgtgacaatgaaagagtcgttgacctaatgtatgaattgtatgaaccatttaatcgtaatcatgatcgtatgattgtgatggatatccgtagcgcagaactgacaaagtatgctgctaactgtatgttggcaacgaaaatcagttttatgaatgagatatctaatttagctgaaatgcttggcgctgatattgaacatgttcgtcaaggaattggttctgattcccgtattggctatcattttatctatccgggctgtggttatggtggctcatgcttcccgaaagatgtgcaggcgttaattcgtaccgcagagcaaattggttatcagcctaaaattcttcgtgctgtggagcaagtgaatgaactgcaaaagcataaattgccttcttttgtaacgcgccatttcggtgaagatttatccggtaagacattttctgtctggggattatcgttcaaaccgaataccgatgatatgcgtgaagcatcaagccgtgttttgatggaagcattatggcaggccggagccaaaatacaggcttacgatcctgaggcgatgcaggaagctcagcgtatttatggtcagcgtgatgatttattattgatgggaactaaagaagcagcgcttaagggagccgatgccttgatcatttgtactgaatggcaaagttttcgtgcgccagattttgatgtcatcaaagagtctctcaaaacgccggttatctttgatggccggaatctctatgatcctgaacgcctgcaatcccgaggttttacttattatgggattggtcgtggtgcttccattaatccggttatctgagtaatacaatgaaattcttagtcacaggtgctgctggttttattggctttcatgtgagccagagattattgcaaatggggcatgaggttgtgggtatcgacaaccttaatgactattatgatgtgaatctcaaacaagcacggttagatctattatttgataggtcaggttttaaatttgaaaagctagatttagctgacagaatagccattcccgatcttttttcgcgacaccaatttcagcgggttatccatctgggagctcaggcgggtgttcgctattcgttgcaaaacccaatggcttacattgattcgaatataatagggcatatcaatattctggaaggttgccgtcacaataatgttgagcatttattatattcttcttctagttctgtttatggattaaatagaaagcaaccgttttctacaaacgattcggttgatcatcccgtttcactatatgcggcaacgaaaaaatcagatgaattaatgtctcacagttactctcatctttatcagttgccaacgacaggtttgcgcttctttacagtatatggtccgtggggacgtcctgatatggctttatttaagttcaccaaggccatgttatcagggcagcctattgatgtttataaccacggtaatatggttagagattttacgtatatagatgatatcgttgaatcaataatcagattgcaagagatcattcccacatcaaatgagggctggatggttgaagatgggcaaatatctgccagctctgccccttactgtatttataatattggtaatggtcaaccaactagactaggtgattttattgaagcaatagaagaatcattaggcattcaggctaagaaaaatttcatgcccatgcaagatggtgatgttctgtcgacctgtgctgattcaagtggcattgtccaaaaaatagggtttgccccaaatacatctgtgaagcagggtgtgaagcagtttgtagagtggtatttgagtttctatcatcagtctaaataagataaggagccgttggctccttatctattgaatcaacgaccgtgaccagagagaaggaaatagttgtgcctgtttgattattaatttatctaggcattggctaagtgagtaactagccttgctttgtcataaagaaaggatacaaaaaacgggcaactcgactaaattcttctcaaggatacttatctcgtttgtacgatagacgttaattcttttgtcagctaagttgttttacaataaaaacacccttctattttaaaagggtgtttttaattaaattaacttgaaaaacaatgaattagagtaagaaactttccagcgttcttccttcgtcttcaattgcttttttgataacagcaggtgtacgtccttggccagtccaagttttagtttcaccgtttgtatcaacatattggtatttagctggacgtgcaggacgttttgctttaccagcagatttgccggcgctcattgtctgaagcaattcgcttggatcaattccttggtcaagaatcattttacgaacttcttccaatttacgtgtacgttcctctaattcagcttgtacctgactttcttcttcacgacgttcttcaacaacgacggtcagtttctcaagtatttcatctaagaactcaagttggcattctcttgcttgggctcgtaaagtacggatgttatttagggtttttaaatcgctcattgtcctggtctcaaattattaatgatgatggcggatgtggatataataatagaatgctattttattttctgcaatagtcaatttctcatattccgataaaatagctctttttttttaaacgtaatttctttacaaaagttatatagcgctttttatacagctatttcgattgtcattccccaataacatgttcagggtacctttaacaaagaggcgacatgataatctctctaatttataaaccaggtatatactaaatcggtaagtaattttaactgtttcttatcatacccgctaaagcagaataatactaagttaaaaaaaacttatgactaatccatgagttatcgctgatttactgttaccggttcctggaagtaaatcacgcacattattaatttgcatacgatatgcaacaaatcagcctggctttcattttttaatttaagcatgaacatttgtcactcaaatgcgttttattactcggctggtgtgatggtggtcatgaatcattaagacatcactaagctaaatatttcggtatatcaacccgtgcagcttactaagatggataatcacgactcaagtttatggtaaactcatctgactatatggctttataaattttgttaaggggcagggttgatggctcaactttatttttattactccgcaatgaatgctggaaaatcgacatccttgttgcaatcctcttataactataatgaaagagggatgagaacgctggtgtttaccgcagaaattgacacccggtttgaaaatggaaaagtcaattctcggattggattatcttctgatgcacttctgtttagtcaacagacagatattggtgagttgatcagaaatgaaaataagcaggcaaaagtgcattgtgtgcttattgatgagtgccattttctcacgaaagcacagattgaacagatatgtaaggtgactgattatgatgatattccggttctttgttatgggctgagaactgatttcagaggcgagcttttcagtggtagccagtatcttctagcatgggctgataagttagttgaattgaaaactatttgctattgtggacgcaaagcgaaccgtgtattacgttttgatagcgaaggtgcggccatttatgatggcgagcaagttgatatcggtggtaatgaaaaatatgtgtctgtttgccgtaagcactatatggaggctattaatgaggcgaggaaaaacagaaaagacagcgtgtaatggatagatttctgtgaagcgattggatgttctgtttgagagtttgtattaagaatatacccaatggatttcaagatggatcgcgacggcaagggagtgaatctccgggagcatagataacgatgtgaccgggcagccaacaaagaggcaacttgaaagataacggatatagagcagcgtaagttaaaggatgctgatatcagcacccttaagtagtatttaatcagttaataaatttgttcttattggcttttttctgttgcaacggtttctgtgaattctcgtccatagtatgaatccaacagcaattgttttagctcagaaatcagcgggtagcgtgggttagcaccggtacattggtcgtcgaaggcatcttcagataacttatcaatttttgccagaaagtcagcttcttgaacgcccgcttcacggatagatgtcgggatacctagctcagacttgagctctttcagccaggctaacagtttttcaatttttgtgacagtatggtcacccgtagccgataaaccaagatgatcggcaatttcagcgtaacgacggcgggcctgtgggcgatcatattgactgaatgcagtctgtttggttgggttatcgttagcgttatagcggataacgttacaaatcagcaatgcgttagccaagccatgcgggatatggaactcagaacccagtttatgcgccatagagtggcatacccccaagaaggcattagcaaatgcaatccctgcaatagttgctgcattatgaacccgttcacgggcaactgggttcgtggccccttcatgatagctggttgggaggaactctttcagtagttttagcgcttgcagtgcttgtccgtcagagtattcgtttgctaagactgatacataagcttctaaagcgtgagtgattgcatccagcccaccaaaagcacagagtgatttcggcatatccatgactagattggcatcaacaatagctatattaggcgtcaattcataatcagccagtggatatttctggccggttgcatcatcagtgacaaccgcaaatggtgtcacttcagaacctgtgccggaagttgtggtaatggcgaccattttcgctttaacccccattttggggaatctatagatgcgtttacggatatccataaaccgtagagctagctcttcgaaatgcgtttcagggtgttcatacatcacccacataattttggccgcatccattggggaccctccccccagagcaataatgatgtccggtttgaatgagtgcatttgttccgcacccttacgaacagtgcttagggtagggtctgcttcaacttcaaagaaaacttctgtttctatcccgtgggatttcagcacatcagtgacttgatcagcataaccatgattaaataagaaacggtctgttacgataaaagcgcgttttgcaccgtcggttgcaacttcttctaatgccacaggcagggagccgcgacggaagtaaatggatttcggaagtttatgccacagcatattttctgctcttttcgccacggttttggtattgatgagatgtttgggccctacattttcagagatggaatttcctccccaagagccgcagcctagtgtcagagagggggcaagcttgaagttatagagatcaccgataccgccctgagaagcaggagtattcacgagaatacgagctgttttcattttatcgccaaaatacttgattcgtgcggcttgattgtcctgatcggtatacaagcaagaagtgtgaccaattccgcccatttcaaccaatttttctgccttttctacggcatcttcaaagctattaccacgatacatagcgagcagtggagacaatttttcgtgagcaaagggttctgcttcatcagttaagctcacttctccaatcaagatcttggtcttttcaggaacattaatgcctgccatttcggcaatttttgttgcagattgaccaacgatttccgcatttagactaccgtttttcagaatgatatcttgaacagctttcagttccttgccttgtaacagataaccgccatgagtaaagaaacgtttacgcacctgatcataaatttcatccaccacgataacggattgttctgaagcgcagatgacgccgttgtcaaaggttttagacatcagaatagatgcaacagcgcgtttaatatcagctgattcatcaatgacaaccggggtgttaccggcaccgacgccgattgcgggcttaccagagctgtatgccgcttttaccatacctgggcctccggttgccaggatgagattgatgtcttggtggtgcatcaatgcattggaaagttcaacggagggttcatcaatccagccaataatatcttttggcgcacccgcggcaaccgcagcggatagaaccaattctgctgctttggttgttgcttttttggcgcgtgggtggggtgagagaataatgccgttacgggtttttaggctgatgagggccttaaaaatagcggtagatgttgggttagtggttggcacgataccgcagattaagccaataggttcggcgatagtgatggtgccgaatgttttatcctcagacaaaatgccgcaggttttctcatctttataagcgttatagatatattcggaagcaaagtggtttttgattactttgtcttcgacaatgcccataccggattctgctacggctaattttgctaaagggatacgtgcatctgccgctgcaagggctgctgcgcggaagattttgtcaacttgctcctgagaaaagttagcaaattcacgttgtgctttttttacccgagcaacgagttcgttcagttcagtaacatgagttacagtcataaagaagtactcctggaaaatattaaaaaccctttaatatcaatgaataagtattttttagaccatttaattgggtgattttttggtaactacaggttaccatttggtattaaatatatattgatcttaatcacataaattcccaagctgattcctttcagcttgggtcagtgataattattattgattgggttgtaaatagcgttaaaaggttgaatttttaatctaataaaaatatcgggttaacaacttgttatataagatattttaaattaaaaaaagcgttgtggttgatggaaaagggaacttctccagtataaagtgaagaaaaaattaagttttatatgatctttgggagagcaatcatgagaatgtttttaacaacacagcgtaactcaatagaggttcttcgtgggtgacttactgctggatctgccaggttacattaagttttttgttgggctatttgcactggtcaatcctgttggtattttgccggtttttatcagtatgactcactaccaagcccaatcggcgcgtaatagaactaactttattgccaatatttctgttgccatcattttatggacagctttgctgttaggtgacttgatactgcgtatgtttggcatttccattgactcttttcgcattgccggtgggattttggttgtgaccatcgcgatgtcgatgattaacggtaaacttggagaggacaaacagaataagcaggaaaaatcagaaacagccgttagagaaagtgtgggtgtggtgccgttggcattgccgttaatggcaggtcccggtgcaatcagttcttgtattgtctggagttctcgttatcagggatggcagaattttattgggttgatgcttaccagcgcgttgtttgctttttgctgttggttattgtttcgatctgcacctttagtcgtcaaatatcttgggcaaacaggcattaacgttatcacccgaattatgggactgctattgatgtctttggggattgaactgattgtgacagggatcagagcgctattcccagggttgctttgatatgatttacgataaaaggtgctagcttcctttctagtgaaattacaaattataatattcttatcatttttattataaagcctatttcataggcttttctcccttcttttatcggtacttcctgaattttatacaaataacccaatatttttctaaattattctttcctgttagttcaatgtgtaactggttgcttccaccactgttttgtgatgaatgtaggtttttaatttgcattgattgcaatttgttaaaattatgtttattttcatctttagtctagctttgtttactattttatttaagtgttaagttgataatgctatatacatcaattagttataatgaattttggggtattttatcaattaatgtaataagtcgtactaagttgtttgtaaggatgatttttgcaatatgagagcgatattttaacaattgatatgataagttgcctttaatatttaatccgttactttgggttaaataatgtgaagataccggccttgatgggatatgtggaatgaaccggtccatcaaactggaggtaaaaaatgaagatcaaacgattaaaattacataagtttatttcctgtatatttttattatcggcgttttctgttacagccgtgtctgccgctgaacttccagatggtgtgaaacttgcggataaacagcagattattattaataatggcgcagaagttgcctcgcttgatccacataaagtcgaaggtgtaccagaaagcaacattattcttaatctcctggaagggttagtgaggacgggttctgagggagaagttgtgccaggcgttgcgacccattgggaaaatcaggattacaaggtatggactttttatttgcgtgataatgctaaatggagtgatggaacgcctgtcactgcccacgattttgtctatagctggcaacggttagctgacccaaaagtgggttcaccttatgccagctatcttcaatatgcttacgttgaaaatattagtgatgttctgaagggtaaaaaattgcctgatcagttgggggtaaaagcgctggatgatcatcgtttgcaggtgactctgacgcaccccgtgccttatttcgtcagtatgctcagccatacggcaatgaaacccgtcaaaaaggatgtggtcgaaaagttaggtaataaatggacgctaccagaaaactatgtgggtaatggggcgtatctgttaaaagagtgggtggtcaatgagcggatagtgatcgaacgcaacccgcgatattggaacaatgcaaaaacagttattgatcaagcgactcttttaccccttcaatccgaaaccagtgatattaaccgctatcgtagtggagaggtaaatatcaccaatagcgccattccgccgactctgtatcagaaaatgaaaaaggagctccctgaacaggttcgtgtcagtccatatctttgtacgttttattacgaaattaacaacaaaaaaccgccatttactgatgttagagtccgcgaagctgtcaaattaagtctcgaccgggatattatcgctggaaaaattatggggcaggggcaaatcccggcttatggtttcacgccaacatttatcggtggtggcgattttgttaagccagaatgggctaattggacacaggagcagcgcaataaacgcgccaaagaattgttagcccaagccggtttcaatcaggcgaatccattgaagttcaccttgttgtacaacacctctgagcaaaataaacaacaagctattgctgccgcttccatgtggaaaaagaatctgggagcggatgtgattttgcagaatcaggaatggaaaacctctcttgaaagccgccatcaagggaattatgaggtgaccagagcaacctggtgtgccgattacaatgaacctacagcatttttaaacatgttgttgtcagacagcagcaataacaccactttctatcagaataaaaattttgatagctatctggaacaggcgttaatcgctaaggatgctattgagcgtaagaaattatatcaacaagccgagtttcaactggataaagactcggtgctgattcccgtttattaccgggtgagtgtacggcttgttagcccatcagtgggagggttttcagggaaagacccattggattatatggatattaagcgactgtataggataaaaaattagacagtagctttattcaaaagagttactgagaccctgcaaacaaaatcgttccttttgtatgcaggtggtaatccaccccttatttctgggccgtcggctgataaaaagtctgacgatgtaaaattggagtagaaaaagatgataaacacaacgaaaaagagactacttactgtcagcatcagcgctgcactgagtatgataatggcaagtcaggtctttgcggcaaaagtgcctgatggcgttcaattagcggataaacaggttttagtccgtaataacggttctgaaccgcaatcgttagacccgcataagattgaaggagtaccagaatcacatttggcccgcgatctgtttgaaggggtcgtcatcgttggtccgaatggcgaaattttaccaggttctgcgaccaattgggaaaataaagacttcaccgtctggacattccatatgcgtaaagatgctaagtggtctaatggtgatcctgtcactgcgcatgattttgtttacagttggcagcgtctggctgatcctaataccgcttctccctatgaaagttacctccagtatgcccatatcaccaatattgatgacatcatcagtggtaaaaagaaaccagatgctctgggagtaaaggcgctggatgactatacattgcagcttacattgagcgaagcggttccttatctaccaaggcttttggctcactcttcaatgtcaccggtgcataaagcgacggtagaaaaatatggcgaaaaatggactcagtcgcagaattttgtcggtaatggggcttataaactgaaaaattgggtagttaacgaacgtattgtgatggagcgcagcccaacatattgggataacaaaaataccgttattgatcaggttactttcttgccaatttcgtcagaggtcacggatgtcaatcgttatcgcagtggtgaaattgatatgacttataccaatttgccgattgagctattccagaagctgaaaaaagagatcccgaacgagttgcacattaacccacaattatgtacttattattacgaaattaataacgaaaaacctccatttaatgatccccgcgttcgtactgcactgaaattggctatggaccgcgacattgtgaccaataaagtaaaagcacagggtgatatcccggcttccggttatacaccgccagtgactgatggtatgaaagagatgaaaccggtgtggtttactggttggagtcaggaacagcgcaaccaggaagccaaaaaattactggctgaagccggttataataaagataatccattgaaatttaatttgctttataacacatctgatctacataaaaaaattgcaatcgcggtagcttctatttggaagaaaaatttaggtgctgatgttcgtttagaaaaccaagagtggaaaactttccttgatacacgacatcaggggaattatgacgtggcccgtgctggctggtgtgccgattacaacgaaccttcttcattcctgaattcaatgctttcttacagtagtaataacacggctcattataagagtgatgagtttgataaactgatgaaacaatctctgaaagtggcaacagatgatgaacgtgctgctgtttaccagcaagcagaagcgcagttagataaagattcggctattgtccctctctattactatgtgaatacccggttagtgaagccctatgttggtggctatacagggaaagatcctttggataatttacacaccaaagatttttatattatcaaacactaacgttgtaaagcagcccggagagggctgctttagggtcaaattattttaaggccagggttgagggccaacacataggaacgggcgatgcttaaatttattttacgccgttgtttagaggcgatcccgacactttttatccttatcactatttcgtttttcatgatgcggttagcgccgggcagcccatttaccggtgaacggaaattgccaccagaagtgctggcaaatattgaagcgaaatatcatctgaatgatccaatttataaacaatattttgattacttaattcaactcactaaaggagattttgggccctcttttaaatataaggactactctgttaacgatcttgtggcaacagcgtttccagtatcggctaaattaggcgtctcggcatttatcatggcggttgtcttgggggtcagcgccggggttattgcggcacttaatcaaaataccaaatgggattatacggttatggggttcgccatgacgggggttgttatcccggggtttgtcgtggcaccgttactggtgctggggttcgctattcatcttaaatggctaccgggaggaggctggaatggcggtgcgcctaaatatatgattttgccgatggtggcattgtctttggcttatatcgccagtatctcccgtattacccggagttcgatgatagaagtgctgcactctaactttattcgtactgcgcgagctaaagggttgccattgcgcatcattattttccgccatgctttaaagcccgcattattaccggttatctcttatatggggcctgcttttgtcggcattcttaccggctcaatggtgattgaaacgatcttcgggttaccgggaatagggcagttgtttgttaatggcgcattgaaccgtgactattcgttggtgttaagtctgactattttagttggtagcttaacgattctgttcaatgcgattgttgatgtattgtacgctgttatcgatccgaagattcgttattaagactggagcacgcaatgatagttaataaacaaaatagcgaagctctggaaaatttctctgagcaattagaaattgaaggccgtagtttgtggcaggatgcacgacgtcgttttattcacaaccgggcagcgattgccagtttgtgtctgctatctttgattactttgtttgtgatcttggcaccgatgttagctcaattcacttatgacgatactgactgggccatgatgtcgatgcgacctgattttgaatctggtcactattttggtaccgattcttccggccgtgatttactggtgcgtgttgccattggggggcgcatttcattaatggttggggtggcagccgctttggttgcggtcgtcgtcgggaccttatatggatcattatccggctatatgggcggaaaaatagattcagtcatgatgcgtatgttggaaattttgaactcatttccatttatgttctttgtgatcctgctggtgaccttcttcggacagaatatttttctgatatttatcgccatcggtatggtgtcatggttggatatggcgcgtattgtccgcggtcagacactgagcttgaaacgtaaggagtttattgaggcggcgttggtgtgtggtgtgccaacccgtcatattgtgctgcgccatattgtccctaatgtgttgggagtggtggtggtttatgcctctttattggtgccaagcatgattctgtttgaatcatttcttagttttctgggattgggaactcaagagccgttaagcagttggggcgcattgttaagtgatggtgcgaattcgatggaagtttccccgtggttgctgatgtttcctgccggttttctggtggtgacactgttttgttttaactttatcggcgatggcttgcgtgatgccctcgatccgaaagatcgttaaggaggtaacatggacagcgttaaaaaccagaaaagttctgagccgttgttaattgttaaagagttggacgtgacttttagcacccctgacggggatgttaccgcggtgaacaagctgaattttgatttacgagcgggggaaacgctgggaattgtgggtgaatctggttctggcaaatcacaaaccgcttttgctttgatggggctactggccagaaacggcaaaattggcggttccgctatttttaatggcagggaaattcttaaccttgaagagaaagcgcttaaccgcatgagagcagaagagatatcaatgatatttcaggacccaatgacatctctcaatccctatatgcgtatcggcgatcagcttacagaagtattgatgttgcataagcatatgagtaaaagtgaagcataccttgaatcgatacggatgctggatgccgtcaaaatgccagaagcacttaagcgaatgcggatgtatcctcatgaattttctggtgggatgcgtcagcgtgtgatgatcgcgatggcgttgttatgtcgaccaaaattgttgattgctgacgaaccgacaaccgcacttgatgtcacggttcaggctcagattatgactttactgaatgagctgaaacgggaatttaataccgcgattattatgattactcacgatttgggggtggttgctggtatttgtgacaaagtgttggtgatgtatgcggggagaacgatggaatatggttcggcccgtgaagtgttttatcaaccaacccatccttattctattggcctgcttaatgctgttccacgtcttgatggtgatgaagcatcgttgacgaccattcccggaaatccacctaacttattacggttgccgaaagggtgtccgttccagccacgctgccagttttcagtagatcgttgtgtaaattgtgatccagggttagagacatttggcaacgggcgtttgcgagcttgttttaaagcaccgggggaattggtatgagtccgattgaagaaagacgtgtgctgctggaagtagcagatctgaaagttcactttgatatcaaagatggcaaacaatggttttggcaaccaacaaaaaccttgaaagcggttgatggtgtcacattaagattatacgaaggggaaacccttggtgtggttggtgaatccggttgtggtaaatcgacttttgcgcgtgcaattatcggattggttaagtcttccggtggttcggtaacgtggttgggaaaaagcctgctggatatggatgataaacagtggcgggatattcgtagtgatatccagatgatattccaggatccattagcatccttaaacccgcgaatgacgattggcgatattatcgctgagccactgcgcacttatcatccgaagatgaaagggctggaaattaaagagcgggtaaaagccatgatgatgaaggttgggttattaccgaatttgattaaccgttatccgcacgaattctctggtggtcaatgtcaacgtattggaattgcccgtgcacttatccttgaacctaaattggtgatttgtgatgagccggtatctgcacttgatgtatccattcaggctcaggtcgttaacttgttgcaaaaattacaacgagaaatggggctgtcgctaatttttatcgctcatgatctggcggtggttaagcacatatctgaccgtgtactggtgatgtaccttgggcatgcagtggagttgggtacttatgatgaggtttaccataatccacagcacccttataccaaggcgttgatgtcggcggtaccggtgcctgatccagataaagaacgaaataaacacattgaattgttggaaggggaattaccgtcacctatcaacccgccatcaggatgtgttttccgtacacgttgcccgatggcagatcctgaatgtgctaaaacccgaccattgatggaggggagtttccgccatgccgtgtcttgtttgaaggttgatccattgtagttattgagggacactcaatgtgagagttacttttggggttttatatcaggattcagacctgccttaaaacgggtagctctcactttttgcataaaaaagagcagatcaaaataactgactttaatttttcactctttccacaaaatatggtaaatcgggtgagatttttctcgacaaataaggatgcgggcaaaaacatcgttgatctcagcatcctcagattctgctagcccgataatgacttcggcaaagaaatcagggtttggattgaaatccacgtgtttaagccacccatcagaagggggcagtaattctgcgccgccacgtatttcgaattgtaagctaaatagcagaatatcagcggggtcaaggttgaacgaagccagttcgagaaagatgtcataggctttctcaagggtttcatcttctgtcatgcggttattgaggtctaaatccatagcttgtggagatctgttgtccatattgatttattcgtaggtcatgatgaagaattaaagcatgttgaagcgttgattggtacccccgtctttacaagacgagggtattggtcacagtagcgggctaaagaagtaacaaatacgctcaataatccgatgccacaaagggcgttgttcccactcatgagtttccagcaatgtagaatgggcgatataatcgtattgcaccagcgtcagatcattaccaaagttttcatcatcaatcaccacggtaatttcgaaatttagccacaggctacgcatatcgagattaacggaacccaccatgctgagttggccatcaactaaaacgcttttagtatgtagcaatccatcttcaaattgataaatcttaacaccggcgtttaatagttcagcaaaaaatgcccggcttgcccaacgaactaaaaagaaattatttctgcgtggaacgataataataacctcaacccctcgtaaagcggcggtgcaaatagcatttgtcaggtcatcactgggaacaaaataaggggtagttaaaatcagttgcttacgggcagagaaaatagccgtcattaaagattgttgaatcaactcctcagggaatccggggccggatgcaataacctgagttgtgtgtccactggcctgttcaaatggcatgatattgttatctggtgatggcggaaagatacgttgacctgtttccatttcccagtcacaagcgtaaataacccccatggttgtagtaaccggtccttccattcgtaccatgatatcgatccattgcccaacaccggcatcttgtttaaaaaagcgtggatcgaccatattcatactgccggcataagagatataatcgtctatcaagataattttacgatgctggcgcagatccatacggcgtagaaatagacggaatatattgacttgcaaagcttcaacaaattcaattcccgcctggcgcatgatatccgggtattggctacggcaatataaccagctaccggctgaatccaccataatacggcatctgactcctcggtgtgctgcggccataagagcatccgtcacttgctcaaccaagccgccggtttgccagatgtaaaacaccatatcaatactgtgtttggcattctcaatatctttgataatggtttttagtgaatggtcataggttttcagtagttggatcttgttacctttaacacccgccagcccttgccgtcgttcgcaaagctggaatagtggtgtcgcgacttcgctattttctgtcgcgaagatatggcgagatttgcgcaattcttcaagccatacggttgttgaaggccacatggcttttgcttgttcaactctgcgttttcccaaatgcagctcaccaaatgacaggtaagcgatgattccaactaagggtaggatatagataatcagcagccaggtcatagcagaagtgaccggccggcgttttatcagaatgcgtaaagtgatactggcaacaatcagccaataaaagaaaatagcaagccaacttaggacggaataaaaggttgtcatattcggcaatcaatcctgttttgttcagacatctttggtggcgtttaacgcggtttcctcaagactcgggatatacctgttatctttcaagttgcctctttgttggctacactctctcaccccggtcacatcgttatctatgctcccggggattcgctcccttgccgtcgcgatgcatcttgaaatccatagggtatataaacgatctaattaacttggtgaatttaccaaaaaatcggcaaatatactgcaagcatcatacttgatattggtcatttcgcattattgatacaaaaagtactatccagatacgccttggatatcttttttaaaggcttataatgagcgtgatgtttttataggtaggttttatgaaacgtagtcggaatgaagtagggcggtggcggatgttacgccagaatctcaaccgccgtcgccgttggttggaagggcaatcaagacgtaatttgcgtatttattcactacgtaaattagatggttataaacagcgtcgagctttattgtttgttcagcatggcgaatggatacattgaaaaaataatatttttggccttatattcacgctcacctacaatctttattgaatatgattgctatttgcatttaaactagcagtcattcgaggattgactttatgctgctaatcaagaattcccttatgcgctggatacattggccaatattgttgtcagtttgtttacacgtttctgttgctgccgcacttttttgttctgcaataccggaaaagcagcctgatgctgcacttatgtctgttgctatgattcagttagctgccgaagaagcgcctgtttcagaaccggcagcaccagaacctgaatcagagccagaggagccggaacctgttccagagccggtaattccaaaaccagaggtgaagaagctaaaaccggaagtgaagaaaaagattgttaaaaagcaatctgaacccgttgaaaagagggctgagcaaccggaaaagccgttgtttaatcagaatgcattagctaaccgtactgataataatcagaataaaccggtggttaaaccgcagaatgggccaagagcattaagtaaagcgttacctgtctatccatccagagcgtcagccttgggcaccgaaggttatgtgaaagtcaaatatgatattgatgaagacggacgggtaaaaaatatagaagtgattggggctaatccacctaatgtttttgaacgggaggtgaaaaaagcgatgagaaaatggcgctttgaaaaaatacccgcgcttggttatatcacaaccgtcgaatttaaaattacgggtatatctcaatcctgattgtcggggaaatgcaaaataaaaaaggagcattattaacacgctcctttttcgattaatgtttattcgctagtactgctagcgagttgaaagtgggttttaccttctggtaaccgacgtgaagtattatcttcatttaccgcaacataagtgaataccgcttcggttgcacgatagcgttggccgacaggttcagaggcgactttcttcacccagacttcaatgttgatggtaatcgaactgttaccggttttgaggcaatgtgcatagcagcagacgacatcaccaacggcaacaggtttcaagaaagtaataccatctactctgacagtgacaacacggccttccgcaatttcttttgccagaattgcaccaccaatatccatttgtgacattaaccatccaccaaaaatatctccattggcgttggtatcagcgggcatagccagtgtgcggaggactaactctccgttaggtaattgttgttgtgtcattgaaaactttactttatttgatgaaaaaacaatacctgcctacagacgatagcaggcaggtatccatttgaatagggttacttctgttcgcgtggcaggtgacggtaaatatatactacactgagcacggtgaaaaccagagtcagggcagtcagaccaaatactttaaaattaacccagacatcttgtggtaaccagaatgcgacataaatattagccagcgcgcaggctgtaaaaaacagcgcccatgccatattgagtttattccagacaagatcgggtaaaattaactcttttcctagcattttctgaataagtggttttttcataaaccactggctgcctagcaaagctaatgcgaataatgcataaattacagtgactttccatttgataaatagatcactgtggaaagctaaagttaacgtaccgaaaacagcaaccatgataaacgtgatcagggaggctttctctactttccggtagatgaaataagtcatcgcgacagctaaaccggtagcggcgatcaacgccccggaagcgtagaaaatgtcatacatcttgtatacgacaaaaaagacgactagaggtagaaagtctaaaagttgtttcatatttgaacctattgtaattccggcatctgattatcatccgataatggactagcagcaacagtatggttttatctttcaataaaaaaggtttttatcgatcggtttcgcacaattttaccataaagagcggcgtaattaacttccggttgtcagtgaacatataaggcagcattataacgaaaacccgttgaaaaataagagggcataaaccagatgcagtggaaaaaactacagcgttggatgccagggttgggcaatttttctcattatcgcaaggaatggtttagtcatgatttaagagctgggctttctgttgccgcagttgctctgccagttgctattgcttacgccgaattgatgggaataagtgcaattatcggtctttatgcatgcattttacccatgttcgcttatgcactatttggtacttcaagacagttgattgtcgggccagatgccgcaacgtgtgccgttattgcagcggctgtcgcgccattggtttttggtaatgaagatgtacgctggcagctcacgatcgtaatgaccttaatgaccgggatatggtgtgttctcgccagtcacttccgattaggcgcgtttgctgattttctttccaaaccgatcctgaaaggattaatgaatggtgttgcattgacaatcattgtggatcagctagctaaagtctttggttttgctggcgttccgatgggattgattgaacgggtgatcgcattacctgccaagctcatgagtacacatttaccgacgttagcaatgtctgttgctatggtattgattttgctcactgttcgtttcttgcgcccgacttggccggggcctttgttagcaatggtattagcgacttatataagctggcaatttgatctggaaaaatatggcgttcagattgttggcagtgtcagcggtgggggattacctgttgtgccaatgcccgattttcagcctggcattatgcgtgagctagttatcccatctttgaaccttgctgttatcagttttgtcagttttatgatgacggcccgtagcttcgccagtaaaaacggttatcagattgatgcagattgtgaacttagggccttaggcattgcgaacattgcttctgctttatcacaaggatttgctgtcagtgctgccagcagtcgtactgcggttaatgatacgattggtgggaaaacgcaattggtctctgttattgcagcgaccattattttgctggttttgttatttatgactcgttttctggcttatatcccattgtcatctcttggtgtggtgctgatttattcggcatcgtcattgttaggcttacggcagatttggtcactgaggaaacgaaatcatcaggcatttactttatcactatttacattcattgccgtgctggtggttggtttgattaacggtgttggtttcgccgttctgctgggtttattacagtttttgcgaattatattccgcccgacagatcaactcttgggagtgaatgaccaaggaatgattcattcaattaatcatggcaatgatattaaaccaatagatggtgtgatgatgtaccgatttaactcgccattgacttatttcaatgttagctattttaaaaaacgggtactacagcatgtcgacagaattcaaaaaattaacaaaacgcaaaaacgtccgggttggctggttgtcgatgcggctgttagttttacccatgatgatgtcagtgtctttgctgctattgatgagttgattagtgaattgaaagtaagagatatcaccttggtgctcgccggtcgtcggacagaacttacccgttggataaaacagaataaactgcgaagtagtgatgacgatctgattgtggtgcccgatctctattttgcggtccgaatgattcaaagtaagcctgaatggtactctaattacgctaaaagatataatagcgttattgaaatcaaccaatgaatacgataaataaaataataacattgatgattataatcgagaaaaatagttcttaattcccgaacgtatgattattgactgctgctcttctattatctgagatatcagatcctgaatacctgctttatttaaaaatttcttgttaaaaaacaatatgattggaatattaagtatttactaccacgttacattttgtttttcgataagtatattttaacaaagcaaaatcatgattacttgtacaataactatttaggacgttccaatgaaaaaggcattgatagcctcagcagtggcagtgggtttatctgtattcgcatttgcagcaaatgctggtgaacatacgatttctggtggatatgctcagagtcatgtgaaagttgatggtgaaaagcttgatgaaaacccaaaaggctttaacctgaaatatcgctacgagctggataataattttggtgttattggttcatttacgctgacacatcagggttatgattactattatggtagtagcaagattggtactggtgatttagattattattctctgatggctggtcctacatatcgctttaatgagtacgtgagtgtatacggtctggtgggtgctgcacatagaaaggtaaagggtgaattttctgcctatggctatgactttgaatataaagagagtaagacctctgctgcttatggtctaggattgcaatttaaccctatgccaaattgggttattgatgcatcttatgaatattcaaaactgggtgatttcaaagttggcacttgggtaattggtgctggttatcgattttaaatagtgtttccaatgtagtcgttcctttaaagggaattcagtccaacttttgtgatctgtgcaatcacattaagtgactgaagataataaatgaatgttagaaccaactctctgttagcttgttagatagtttatctattaagtctatcgaaataatgaaaatagagagaacatattttcatcagggattattgaaagcgggtatccaggtttagccatgtaatctgaagattattcctttattagttatcactatctattctatacaaaattccctgtggtaaaacagggaatttttttgcgtttattccaatagtaataaagaactaataagtacgaacaatagtcgattgcagtgggaagatttccatgatacagcggagcagtcactagtttcttagttaaacgggaaattaacaataaacgagattgagttgttttctattgattgttgataaataatcgcgcctcgtaattaatcttttctataattttatataatattagggattttcaatgaaaagaacattagtggcttcagtggtagcggtaggtttatctgtatttgcatttgcggcaaatgccggtgaaagtacgatttcgggtggttatgctcaaagtcatgtgaagtttaatggtgaaaagattgatggtaatccaaagggaaagggtttcaacctgaaataccgctacgagttggataataattttggtgttattagttcattaacatatacccacaagggtttcgataaatttgatgtgaattattattccttgatggcgggccctgcatatcgttttaatgactatgttagtgcatatggtatgattggtgctgcacgtggagagtttgaagttcctgttttgaatgggtcatataccgagggtaaatcatctgttagttacggactgggattacagtttaaccctgttccaaactggactattgatacatcctatgaatacgcaaaatttaatgacgccagattgggtgaccttaaagtaggcacttgggtagttggtgttggttatcggttttaatagaaatttgctaatttgtacttaatttagctaacttttctacagaaattccctgttatatgacagggagttttttgtgtttatatcaatagcaacgatgtgctcacccagttatcactagcttattctgtttaccccatagttttatcactatggggctttgtttgttatattgatttttgttgtggagaggcaatcagcatatacaaccggtatagataaatcagcaaaatagctgaaatgaggttattaaacacaccgagaataatccctgccatctcgctgtgaatgaatgttaggcggtcaataataaacaccagcaagagcctcgcggtcagccataaaagaattgccggaaccagcaagcgaatattggcaaatgccagtttccagcttattttcatagaagcaaaaacgccgcgacgctcggcagtcataatcacgggtgataacgccagcgcgatcgacaaaataatgcctggtaccagcatcagcattaagccaaattgaatcaacagagtgcagataagcagtaacaggaacagtttcggtaactggcttgctgataaaccaattgcctgtaatgaagagatacgatttcccgctgaaactgccgcaaccagtgtcaatacaccaccaactagtaacacgctaccaatcatgcttgagaaaatggttccgattcccgcacgcatgatcattgattgttgctctggagtcatttgagacaccagctcttgaataccggccttgcctgaggtggcaaacgtgaattctgcttctgtcagcaacttcatctgttcgctgtcaggaataaacaggtgccccaataaggtggtaaccagagccgccagaacggccagggtcagggtacttaacagttgattcttgaaaaagttaaaactgtcacggtacagggtattcgccgtgattggcatgaagacagctcctatcaggttaaacaacaatacataggggatgattgtaccttgttatggggaaacgtggatagtagaaacaagatgatacggataaattaatggttagctgtgattgttgatgacagaaaaaaattcttcacattatattcttaagataaaaataaacataaaattaaccttattaaaacataatggaaatataatgagaggaaagataaaacatcggaatggtaaaaagatgactaactgattaataataaataaactttgatttggatcaagttaaaataattcctaattgaaataataatattatagatatgcggttttactgaaattctttgaaagatgtgatctgtcttggatcataatttctaatatatgagtatattttgattgactttaaatcacaggaatgggatgaataatgaaaaaaatttctgcatttgtattagcagcggcaactttagtaccctcattcgcttttgctcatgaagcgggtgattttattttccgcacaggcactgcaacagtaagacctaatacaggttctgataatgtattgggggtgggttcttttagtgcggataataatacccagatgggtttaactttcagttatatgatgaccgataatattggttttgaattactggcagggacacccttccagcatcgggtaagtttaccgggtgttggtgatattgctaaagtaaaacatctaccgccgacattaatggcgcaatactatttcggctctaaagaaagtagtttccgcccttatgttggtgttggtcttaactatactactttctttaacgaaaaattcaatggtaattcggctgttaaagataataacttacatagtctggacttgaaagattcctggggtgttgcggggcaggttggtctggattatgagttagatcagaattggatgttgaacgcctctgtgtggtgggtaaacattgaaacagatgtgaaatttaaagcaggtgaccagcaatataaaattgatacccggcttgatccgtgggtatttatgtttggggttggttatcacttttaataaaaaaatggggcagattttgccccattttttgtaaccggaactagacacgtccccggatacaaccgataaaatcctatcccagtgatttaacatgattaaactaggcactctggaaaccagaattagtgacaaggataactttcgctttcggattaaccgtttcggccagagtgttcaaaaacgccttctgtatctgtggatcttgttgtttatgcgacggaggcatcattcagggcgttttgtcggtattgatgaaaggcgctaagtcatcccgaaagaaattatgacatacttaatgaacaggcatagcagtgatctcactgaaattgttggcgcaatgagtagatcacataacgttatgcccgtctcattttttctgggaattcctcagtactaaagcagcctctccatgatctattgcagagctttacgggcagactaaagtggtttttgacgaactacgacaggcagcataggtagcgttgcacttgaaagtggaatcgtccattacccttaaatatttgttactgctgaatacctatcaaactagattttccgcaagcctgaatcccatgatatacaaaggagaatgatatcttccatgccgtcttcttgttctacatagatcacgaaaccgggtaaaactacctcctctagcaactttatagtggctaccttcagtaagcattaaatcatcatatacagcagtacctgactgatagggtagataactatcagaagtatactcttcaacatttccagctaaatctaaatgaccaaaaggccccatgcctaaaggaaatatgcctactggagtggcatcaacaataccactttcaatactattacaatggtctggcagaaactcatttccccacggaaactcacgcccattacccccagtagctgcatattcccattgggcttcactaggaatatggaaattcctacctgtcttttcacttagccaaagtgcataagacattgcagcttcataagatacagaataaactggataattagaacgttgatgaggatacataccccatgcccaactatcaggaatctcctgatagccagtatcacctaaaaataggtaatattcatagttggttacgcaatatctagccaaaccaaaagaactaagagtaatttcataagacggtatttcctttaaaatccattcttttaatactccatattgagaatacattgaaacaatttcatctacattatcaggagataaacctagacgtacttttccaccaggaataatgatgacatcaggttcaaatatagaaattctagaatcccctcgaatagcaagtaaattaccagccacatatctatgagaaaaacattcattaaaatctctaatgatggattgtaaagtacaactatctagttttgagtgctcatcatatattttaaataattcccccattaaagtttggtttgttttatcaggcaaacccatcgcttcttttatggttaaagaattaatgtctttattctcaatatttatatgttgagttttaatgccagttaggcttaattccttttcaatcatattttaccccataattaaaaacaaattcatttattccatcatatgttgagtaaataaagtcatgttgtatgtatcttatacttgatataccataaaatgaacgtttttcccataatatccatttgttttcatttaaatcatatacaccaatccagccagtataatttcctatagatatatgattatttttagcatcaaatgctacacattttattgaatgagaacttggtgtttttattatttcataattttcatttctccaaattcggagggttaaatctcgactaacacttacaaacaacccttctttactgccatcacatccattagcaatcttttcatgagctttaggaatatatgcataacatgaaaagtcctcaatgctatgtaatgcaactgctgcattggcacatacagaaaaaacaaattctttagatataaaaactccttttattgcatttttatgtaatgaaactatattatcaacaacaatatcaccagctatttttcttaaaacaataccttctccagtgtatgtaccaacaagacaaaattgattatcttcccatgaaacagcagcgcaatttagaggggaatgatgttcatatataatatcaccagtacgagcattaaatatttttcccatttgtccaccggtaataagcacattttcaaattcgataataaagttacacagacttcccatttcggcaaatggcctattattacagaaaactataccagcatcaccaacactccaaatgtctttgcctgaaacgtatacagcattggaaccgtatgttggtctaacatgatcttgatgccatgcttgagtggaaatggtatattgaacataactatcaccaaatgacgcaaaaactaaattatcactatcaagaaatgcacaagatcttggccaaacaattggaggaagctcggctatatgataactttcaagattattatctttttctttccaaagtttcatttttctatcataactcaagcttaccataattttttgagggaagtcataaaccagacgcttaatacccgcttcatgtgcagatgttatttttaatttaccattaattatagttatgatttgcccatgttcatttccagcataaataaccccatcaggcgtaatagaaatagtatcagtttctatattatcaagatctatacattctatttctttctgataatctacatcccaaatccggattgtaccgtcatcgctggaacttattaagtttccagatgaactccattccacagagattacgtcctctacatgcccttttaactgagctatgacgtttcctttataatcagaaacaataatggttttatctctagaacatgttgccacaatatttttatttgggtggaatgatactgattccacatcatcagtatgcgaattgataattccatataatgtcatatctggcaatagccaaatacgacaagtataatcactacttactgttgctatataattaccacatgggctgaaagcgcactgatttaccaaatggtcatgatatactcgtctaattggtttcttattataagcatcccataaaatgactttattatcatatccagcacttaaaacaaatttattaccataagtggcaacaccactgataggagaggtatgtttatgcatagaatatatcctttatagttcaagagcatgaaaggtttttatttttttagcagtcaaataatttttatttttttcatttaagaatgtcttggtattaataacttcatatatttcaattccattctgagaaattggatgtattttatctggattattagttatcaaacgaatttttgaaatattcatggccagtaacattttagccgcgagagaaaaatcacgataatcatctaagaaaccaagagcttgattagcttggtatgtatctaacccattgcgctgtagcttatatgcatctattttattatataatccaattccacggccttcctggcgtaaataaattaagactcctccatgaatatcaatttcttttaaagattcatttaactgctcaccacagtcacataaaagagagtgaaatatttctcctgtcacacattcagaatggatcctaaccaaaggtatgtgtttctctgaccattttcctatacgtatagctaaatgctctttatcctgggtaaatccattaaatgatataaattcagattcattgttaatagatttcaacggtataaaagtactatttctaattgatatattattcatattaagatattcacattgacattatagaaaataaatatagatatcataggtataaatctattaggacataccatatttaaaatcacgtaaatttataggatatttagctctaaactcctttagataataagcatatccatgcaatacctttatacaatattctattctatttaataattgtgacggtataaataacttttcaaaataatagatcacttggagggaactcagtccgatttttgcgatctgatcaattgcgaaaaatcccaaaccccaacacggactgagtgatgcctatcatagcacctatacctcaagatgaatgccagaaaatgagaaaacttatccataaaacccgtgataagaactattcccgtcgattaaccgcgttattgatgctcaatgaaggattgacagtgacttatgtcgccaagacccttcatgccgcacgctcttccgtcaatcgttgggttcagtggtttacattatatgggctggaaggactcgaaagtttacccgttggccgacctgttgtctgggatctctccccactctataacctcttacttttcttattacagcaatccccccaaaagttaggctatctccgctctcgctggagccttgaactcatgactcataccctcaatgaattactcaacctctctctgacgcaaaatgtcctttatcgttactttgctcaggtggggattgtctggcgtagagcggcacccacagtgaaacaacctgatcccgaatacgatgagaaaatggcaaagatcgcggaagccaaagcgaacatttcagaaaaacatcccgttttttatgaagatgaggtggatattgatctaaacccgaaaatcggcgcggactggtgcttcaaaggacaacaaaaacgggttatcaccccgggaaaaaacgaaaaacattaccttgcgggctgccttaatgcccaaacagagcaaatcacctatgttaaaggaataaaaaagaattctgatttatttatcaaaatgttagatgaactgaatcatcaatatccccatgcggaaaccctcacattaatcttagataactactgtattcataaaagtcagaaggtaaaggactggctggcacgacatccaaaatttaccctgttgtttttaccggtctattcaccgtggctaaataaaatagaacggttatggcaatcgctccatgagacaataacgcgaaatcattgttgtcaatttatgtggcagttactgaattatgttgatgcctttttggcatcgttttcatcacagcaaaagccaggaagacaaaaaatgggtgtagcacaattatgaaatcttatttatctatatcgccctctttttctatattacgcaacaccaaatgttcgggtataaaacagattttattatttttatatccagatgaccttaattcagaaatacaaaaagcgccaccatttccagaggatattgacactaacaatgctggcttatgcactaattcgttatcactacataataaaagtaaattttttagttttggtggaaccattcccccccattcaggaactacaataacaaaagcatcagaattcatcaaagattgtgatattaaaccccattcatgccatttaggatcttttacttcattccaaattgactcatcccatattggtatgtttaaatttcccagatggaaatgctcagtatgtttaaatgtttttttggttatttcaagtgaatctaagaaatcaccaactttacctgaattagaatgcgatctatgacttcctgaaataattcccaatttcatttcatttcctcacgttatatattttgaataccttttaacaccaatatcaaaaaccaatttcgctataaaaattaaaattaatgtgaccagagtctgaataaaaaaccatttcatactcattattccacttactactgaagctggaacacccgttataaatagacacggaagtatgaacattaaaataaaacgaactacaccatgaaaagattgttcaggtctcaccaatactttaaaacaaggatttgagttcttaatactaactaatgacgttgtccaaaatattgttgttcttatgatccatgtaattgaagtaagtattaagactccttctaataccatgataaaatgtaaaaaaaccaacaaaatattagtgccaaagtaaatatgtacagtaaaaaataatactaaagataggaatgataataaaaaatgctcaaatgcaatatttgtagtgacatataaaaattgagtgtttataggtagcgttaaatgaggttctaactttaatgacttgacttttttaaccagcaagaggcttcctctaccaaataaaaaaagataaagattatcgactaaacataccgtagtaaaaaatataataataaaaccatcagataaaatataacctgaagattgtgagtttaaaatagcataccaaaaaaaagcttgtgctatatagtaactaaaattaacaaaagcggataaccataaatttaatggacttttttttgcttctgacaatccacttttaaagccaatcaatataactctaagcattaccattatatccttgattgtattttaacatataattccaaataaaattaaaaatcatcattaaacacatcatgactaaaaacccattaaatataaaataaatagatattgagttcgttgcaattttaactggaatataggtaatgtattgaaatggaatataattaaatattgattttaaagaatcaccaaacacatctaatggaattaacgcacctgaaaggacccatgacaaagtatccttaataattataaaagagtacgagcctctaaatttgaatgccatacatgacaatatcattgttaagtacaaattgataaacaatcctatacataacgaaataaatagatatataaaattaggaatgtccttttggtatataattataaataaaattaatggagacattataaacaatctggctaatacttgtccaaa

SEQ ID NO: 27 - DNA, 69727 bp, Photorhabdus luminescens
  misc_feature (15310)..(15310): n is a, c, g, or t
  misc_feature (15343)..(15343): n is a, c, g, or t
  misc_feature (15354)..(15354): n is a, c, g, or t
  misc_feature (69686)..(69687): n is a, c, g, or t
aagtgggaatttaactcaggtctctggaacgcttggttaatgtatccaaaatccttacttgaaaataatggtaaatcggcatttgaaatagcgaatggaaaacccttctttgaatatttggatagtaataaattgctcaaatcaaaatttgattccttaatgtcaaaagattcagataaaatgattgaaaagctatttaatgtttatgattttaatcaacacgataaaatattagatgttggtggaggagaagggaatcttctgataagaatgagtgaaaaggtgaaagaaaaacattatgctgtattggacagatataatgaacttcctgattacggaaatataaattttatagatggagatttttttaaatcaattccgtcgggttacgatttatatattctaaagaatgttattcacgattggcctgataatgacgcaatactcattttagaaaattgccggaaggcaatgggtaataatgcaactattttattgataaccttaatgaaaaaaccacagtctaatataattaaatattttgatatattaatggatgtatcatctttagggaaagagcgtgacttaacggagttcgaatatttggctaaccaggcagggctggttattcaagatgttaaagatatcgacgaatcatattcaattatccaactaggtgtaaaataaattatagataatagtggagcttcaccaaatatgatgatatggatattataccttatggatttcaagatgtatcgcgacggcaagggagagaatccccggaagcatagataacgatgtgactggggtgagtgagtgcagccaacaaagaggcaacttgaaagatgacgggtatatatgtttgataactttatggcaagtatggcattgaaatatttgatgccatatttttattttatatcaataaaatattgaaatagaatatggatttaaatgttgataataagagtagtttaatcgctaaaatattaaaattaagttatattcccttgtttgattttcaaatgttctgaaaatatttaattgtgatcttcatcatttatttttattaaatttagtatagtataataatttgcgtataaaaatagataatttaggtgagttaattggttggaaagtaagggaaataaaatatttattatctcatagggaaaagataatataccctatgggtttcaaaatgcatcgcgacggcaagggagcgaggtgagcgagtgcagccaacaaagaggcaacttgaaagataacgggtataaaacacttcatttctttatgatatacaggataacgctatgctaatcgatcttattacatcatgtagaaaatcaaccgtaatttatgcttttgttgatatgggtttatctgttcactttaaagatggggcctgcgtaaatatcagtgaacttgccagccaatatggccttgatcattctcgctttagccgattatgtgaatatttaatcaaaataggggtattggttagctgcaatgagggagtggcactttctgaggaatgcagtgcacttgccgatccggaaagtatggaatcattgatgataaggtgcgaagttagcccagaatactggaaagcttggtcaatgtattcaaaatccttatatgaaaataatagcaaaacggcatttgaaatagcgcatggaaaacccttctttgaatatttggatcatcatgaattgttcagatcaaattttgattcttttatgtcaaaaaactcggacaaaataatagagaaattacttgatatttatgattttagtcaacataacagaatattagatgttggcggaggagaaggaaatcttttgataagaataaatgaaaaaatcaaaggaaaacattacgctgtattggacagatataatgaaacgcctgttttagaagatattgaatttataaacggagatttttttaaattagttccatctggttatgatttatatattttaaagaatgttatccataattggtctgatagtaacgcaatactcattttagagaattgccgaaaagctatggatgataatgcaactattttgttgataggtacggtgaaaaaattaaaattagaaataattgactctaccgatatattaatggatgtactattattaggaaaagagcgttatttgaatgaattagaagatttggctcaccaagcaggatttgtcgttaaagatatcaaagagataaatgagaaatattcaattatagagctaggtgtaaaataaactacagataattatataccctatggatttcaaattgcatcgcgacggcaagggaacgaatccccgggagcatagataactatgtgaccggggtgagtgagtgcagccaacaaagaagcaacttgaaagatgacgggtatagtgtctctgaaaacaggtataacaaatatggcatcaaaatatctgatgccatatttctatcttatattattgcattaaacttagcgcctatcccaataaccttgttgagataggctgttaattaacaatgggtagaatatgactacctttcattgatgatatttgaagaggaactcattgacatttttttcctattgttgaaatagtatgtttataaaataccttatagtttttcaggttttataattatttatttcttctataaatgaatgtaaatagtaatatatattctacgttatttttttatatttaaccatcaagaattctgagaagagctaattgtgatctttgtcatttctttttatcaaatttaatataatctggtagcttacttttaacaatgcggaagcaaagtgaattatatctttgcgcgaaaaagtaacaaagttaataattacattttgttttatacccaatggatttcaagatggatcgcgacggcaagggagcgaatccccaggagcatagagaacgatgtgaccggggtgagcgagtgcagccaacaaagaggcaacttgaaggataacgggtataaacagattgttgcgatatccaatctatcatcatgttatttcttggattttggataaaatacttaattttttcataatatataccctatggatttcaagatgcttcgcgacggcaagggagcgaatccccgggagcatagataacgatgtgaccggggtgagtgagtgcagccaacaaagaggcaacttgaaagataacgggtatacagataaaaaggatggctcaatgctaactgaactaattgcatcaaatagaagatcagctgcaattcatgcttttgttgataccggattatctactcactttaaagatggaatttatgtcgatataagcgagctttcccgtaaatctggtgttaattatgctcggtttagtcgattatgtgatttcttagttgaaatgggagtgttggttagtaacgataataaattcaggctttctgatgagtgtcatgtttttgccaatcctgaaagttttgagtcattcatgataaagcttgaaatttgctcacattacagtaacgcttggttaatgtatggaaaatccctatttgaagatgatggcaaatcggcatttgaaatggcacatggcaggccattctttgaatatttggatggtaacaagtttctaaaatcaaattttgatgctttaatgacaagagtctcaaatttaatcgttgagaagttacttggtatttatgattttaatcagcacaatagaatattagatgttggagggggcgaaggggagcttttagtaagaattagtgaaaaagtaaaaggaaaacattatgctgtattggatagatatagtgagcttcccgtttctgataatatagattttatcaatggaaattttctaaattcaattccatcgggttatgatttatatattttaaaaaatgttctccataattggtccgatagtgactcaatactcattttggagaatttccgcaaagcaatggataaaaactcatctctattattgataaatatggtgaaagagccagaattttctagatctttcgatatattaatggatgtgttatttttagggaaagaacgtagttttactgaattcgaatatctggctaaccaagctggacttgtcgttcaagagactaaagttatagatcaatcatattcaccgtattcatttatcaaactacagataaaatagattgtaggaactacagattattcccaaagatgattacatgatattgtgtttttgaggaattaatatataaaaaaagcatcaagattttttgatgcttttttatattaaagagatatatagattaaaatagaaagtgaattgaatttaaaaattgatgataaaagaataaattaaataaaaatattaaacctaatatttaatcattccttgcattattcgtgcttaataaggaatatacccgttatccttcaagttgcctctttgttggctgcgctcgctcaccccggtcacatagtttgctatgctcccggggattcactcccttgccgttgcgagccatcttgaaatccatagggtataagcaggatatacttatcctgctgcgatgattataaacgtattaacgtttctcttcttgctgctcctgtttcattatttcacgataccaacgtgggtgatgtttcttcgcccatccacgggttacccaaccttcaaccattgctcgaagagttcctttcacccagaatgccgcataagcgtgaaccataatcgtcaagattaaaccaatagctgacattgaatggattagaagcgcaattcgaattattggaatagagaagagatcagcaaaataggggcgccaaataataacaccactgacagcgagtaatatcaggaaaatagtgatagaccaataaacccctttttgacctaagttatactgaccaatatcacccgcttcctcattttttacaatcttacggatattttttagccatataatgtcatctttgtcgataaagttatgtttaaaatatctgaagaacataaagataaataaaataaacatcactgaaccaacaaagggatgcaaaatccgtgacaattgaggtgtaccgaagatattcatcagccagttaaaagaggggaaaaagaatcctaatccactaatggcggtaaagaaaaaacagagcactaccgcccaatggtttattcgctcaacaggtgagtgacggataataatatctttcctgcttttcatcgctgttcctccccattagctgatttttgtgatgattccgtatcacgacgcgcattttcctcgtcttcttcagtcactcggtttggtccaattcccacataatggaagaggctggcagcgaatgtggcagcaaatcccactgcggccagcggtttccagatacctttccagaaggtgacggtcgggctgatagcgggattgtccggtaagccatgatatagctgtggtttgttagcatggtgtagcacatacatcacatgagtcccaccaaccccatcaggatcgtacaggcccgcgttctcataacctcggcctttcaactcactcacccgttcagccgccaaatctttcatcgcttttttactgccaaaatggattgcaccggtcggacaggttttcacacaggcaggttcctgaccgacgttaacgcggtcaacacacagagtgcacttatatacccggttatcttctttgttgatccgtggcacattgaacggacaacccgcgatacagtagccacagccgatacagtgttcagactgaaaatcaacaatcccatttgcatactggataatcgccccttcggctggacaagctttcaagcagcccggatcagcgcagtgcatacaaccatctttacgaatcagccattccagtttgccgttctcttcaacttctgagaagcgcatcacggtccatgatttagcggttaagtccgccgggttatcataaacaccaacgttatgaccgatctcgtcacggatatcgttccactcagaacaggccacctgacaagctttacaaccgatacatgttgtcacatcaatcagttttgcaacgccctcttggtcatcccgcacccgtggtgcaggagtaaaagaatttgtggcagagcgacgaatgatgtcttgagtttgcaatgacatgatttctcccttacaccttttctatattaaccaggaacgctttgaactcaggcgtttgtgtgttcgcatccccaacaaatggtgtcaacgtattggcaataaagcctttcttcgcagccccttcaaagccccaatgaatcggaataccgatagtatctacttcacgaccatgtacattcagggttcgaatacgtttggtgacaaccgctttcgctttgatgtaaccacgattagagctaaccttgacggtatcaccgtgtttgatgcctttcttttccgccagtttttcaccgatttctacaaactgttcaggttggataatcgagttcaataatgcatgttttgtccaatagtggaaatgctctgtcaagcggtaagtcgttcctacataagggaatttatctggcttacccattgcttcaaagtcgcttttgaacactcgggctgccgggttggataccacattcggatgcaatggattggtccccaatggtgtttcaaaaggttcatagtgttcagggaacggcccttcagccatcttatcaatagcaaacagacgtgccataccttccggttgcatgataaatggaccaacatccgtttccggtgccgccacgctgtaatcagcagtatcgacaccaccccacttagtaccatcccacgtcagtaactgacgtttcgggtcccacggcttaccctgcggatcagccgatgcgcgattgtacaaaatacgacggtttaacggccatgcccatgcccaacctagcgtattacccaatcctgatggatctgcgttatcacgacgggccatttggttaccttccggcgtccagcttccagcaaagatccaacaaccactggcggtcgtgccatcatcacgtagctgcgcaaaagaggttaattgctgaccttgtttcacgatgacgttgccattagcatcaatcagatcaaccagtgcccggccattactctcttgagccacctcttctgatgtggggttgtccgggttgaagtaatcccaagtcatgctcagcatcggctctggtgatgcacccccttccgtgcggtacatatcccgcagacgtttgaagattcctgaaaggatttcgccatcaccgatggcttctcccggtgcatcagcccctttccagtgccattgcaaccagcggccagagttaacaattgagccattttcctctgcaaaacagcaacatggcaggcggaaaacttctgtctgaattttggatgaatcgacttcattaaattcaccgtggttctgccagaaagttgaagtttcagtattaagcggatcgatcgtgatcaggaatttcagtttcgacagggcaccaacgactttgtttttattcggaaaagaggctaccgggttaaagccctgacaaatatagccattcacttcacctttcgacatcatgtcaaaaaattgcagaacgtcataacctttgtcccatttcggcagccagtcaaaaccccagtcgttatctttacgggcattatctccgtagaaactcttcatcagactgataaagaattttgggtagttaccccaatagttaacctgacccggccgcattggttttggcgtatttgcctggaggtaagtttgcaaatcagcctgtttctctgaggggagtgtcagatatcccggcaagctttgcgacaacagccccaaatcagtcaatccctgaatattcgagtgaccccgcaatgcattaacaccgccacctgccatccccatattgcccaacagtagctggattattgccatagtccggatgttctgtgcacccactgagtgttgagtccaacccagcgcgtacagaaaagaagcggtcttatccttaacacaagtttctgcaatatattcacagactttcaggaagtcctcttttggcgtaccgcaaatattactgacgacatctggcgtgtaacgactaacgtgctcttttagcagattccatacacaacgtgggtgcttaagtgtgatatcacgttgagcaaagccgttttcatccagtgcatagttccaactggttttatcgtattgacgtttttctgcatcgtaaccactgaacaaaccatcatcgaacgagtaatcttcacgcacgatcagactggcgttggtatacgcctcgacatattcatgattaatcttatcgttggtcagtaggtataaaatgacacctgacaagaaagcaatatcagtaccagaacggattggagtatagaaatccgccacagatgctgtacgggtaaaacgcggatcaatcacaattaacttagcgttattatggattttggcttccattgcccagcggaatcccactggatgtgcttcggcagcgttaccacccataacgacgatcagattcgcgttcttgatatcaacccaatggttggtcatcgcaccgcgaccaaatgttggagcaagacttgctaccgttggtccgtgtcagacacgtgcttggttgtctacggcgagcatgccgagagcgcgactaaatttttgcgatagataacctgtttcgttactggcagcggatgcacacagcataccggtcgtcagccaacgattgactgtgacaccctcttgattggttttaatgaaattagcgtcacggtctgctttcattagtttagcaatgcgatcaaatgcctcatcccaagtaatacgttgccatttgtcagaacctgctgcacgatattccggatatttcaggcggctttcgctatgaataaaatcaaccaagcccgcgcctttaggacaaagtgcaccgcggtttactgggtgatcaggatcaccttcaatatgaaaaatagttgctttcgcattttttgcgccatcgccaaggctgtacatcaacagcccacagccgacagagcagtatgtacaggtatttcgggtttcacgtgcacgtaacagtttataattacgcgtttgtgcaagggctgcggttggtgcaaagcccaatgctgctaccgttgtacctgccataccgccagcgcagatcttaaagaactgccttctgctgacttgcatgggaatctcctcgctcacattgtcttaaaatgcattgtcttaaaacagtatccattccatcatgggaaaaatttcaaatgtattctttcttattaaaaccactttccgtagcgggatcagatttattgcctgacaaatagtatagactcttttttccacacaattattgtgtcgtaacactattaggaactcatctaatgtataacgtaaaatcagggaagttgttaccatttggtgtgattgagggggtaacacgaacgaatgtgcaacaaaaacaccatttcgatacattaaaagttgattggattgcagaagaagttcctgttgctttagtttataacggtatttcacatgttgtgatgatggcaagtcccaaagatctcgaatatttcgctattggattttcactttccgaaggcatcattgaatctcaacacgagattcgtagtattgatattgtcgctcattgtcgcggcggcattgagttgcaaatagaactttctagccgccgttttgcgggtttgaaagagcgcagacgtaatctggcgggacgaacaggttgcggcatctgtggagcagaacaactttctgatatttttcgccctatttccccgttgcctttcactcaaactttttcattaaaccagcttgactatgctctctctcagctgactagcgtccaagatgttggtgcattgacaggttgtactcatgcagcaggttggatcaatccggaaggtaaattattgggcggatgtgaggatgtaggtcggcatgttgcactggacaagatgctaggcatgaaggcaaaaacaggctggcagcaaggcgctgttctggtatccagccgtgccagttatgagatggtacaaaagtcagccatctgtggcgttgaaattttattggctgtttcagccgcaacttcattggcggtagaaatcgctgaccgatgtcatttgaccttggttggtttctgtaaacccggtaaagcgactatttatacccatgctgagagattaataagttaaacccgctaagaatatgcaatatcaagagtgcctatattcccccccgctgtgattaaggtgaaaagtttatttttatcttaaatcaacagagattgtcttaataatgctaaatcacgcatgcaagttgtgaaacatccataggttgggttcaatgtaataagccatttgttgttgtacatccaccactagcggccctaaaccaccaggaataatatactgcccactttgcagaaatttcattcctgtccattcctgccatttatcaagcgtggcatttatagacattgagtgcatagccggttgaataatcttcgctcccaggcaccagggtgtccgaatccaaggatcaaaaggttcattgttgtcatttttccatctacagtattgtacaaaatcctgcaatggatagttttgctttaacgtcggcctaacaggaacaactaacccttttaacccctcctcaatagccgcttgttttaagctactaatgagtaatgccggtaaattcttgccacgaaattcaggagatactgttactgacagtgctgacaacatttttgttactttttttccacgggcaaacatacctctgcggaaaacttcatcccaaccattatctggcagttgttctaatgaatcgccttcccaagggaaaggtactgaattagcaacaccaattaatcgctgtttttctccttgctgcaaaatagcaaattgctgaaaacggctgaaatctgatttaaataatttattccaatgctcatatgttactggggagttctgcataaacaaaggccaattattataaataagctcatcagtggcattttttaaatcaggtcgttgttttgcagattgaataataatgtgtgttttcaaagtaggatttccggtaaaagtaattcgtaagattgataaatgcttcatgagttgataattataattatgtagaatagcagtaatatttatagacataaagagataatatgttttaagtaattgttactaagagctaattaaataaattttttatcttttattaattatttaaattaaatttttatttatcaagcatacttgaattcacataataagtgcaacatcgttaatccggaagtaaatatgttcgtattcctttaaataattcattcgttttagctctcctcatgaggataattttatgaattcatcaatattttccatgagttttcatatatcttgataacaatgattatgtgtcactatttcacacagggattgtcatcgccttatgaccgataaattggagatcaatcacattggtatcacataattgatacaggttgacttttattgaacctgattaatgttaaagtataagtatttattatgtatatgaattcagcaattcaattattgctgcaagttttctttcctaagtgatttatctgtttcttttccaatttgatgtgactatggctgatatttaggccagtaagaggagagcctgatggcgggtttactaccgattactgtaattgctgcggcggcaggagatattgttcttagtttgccgagacttcctcgtagtggagcagatcaggaagctaaagaaattgatcggcagattggtggttcaggtttcaatgttgctcgggctttagttcgcctgcaaatccctgtgattaatggtatcccggttggtaacggatgctggggggagcagataaccaaagagatgcaggaccttgggcttgaggtcacattgaccaatccatatcttgataatggttggtgtttggcaatggttgaaccggacggtgaaagaagttttgtctccgtgagtggttgtgaagttgactggagtacggcaatgctctcttctattgttttgccggaaagggggtatatctactccagtggttatgtcatggcgagtaaatcaacggcgattttatgtgactggttactggcgtctccatccgggcagacgttattgctggattttggtccgcgtttaccagaaatagatcccactttccttgatgcattacctgctgaccggaccattctgacactgaaccgtgatgaagttgctatattgtgtggagaaggtgatcctgccgtccaagctagccgttattccagcgaaagaaaaatcactattatctgccggttaggttcacagggtacatggatatgtctgcctgatcgtaagccagaatatgttgctgcttataaagtaaaagtggtggataccatcggtgctggtgatgcccatagtggtggcatgctggcgggattatcgcagggaatgtcgctgagagatgctgttgaacttggcaatcgtgttgctgctattgtcgtcaaccgttctggtgctgctggtgcaccgacaataaaagaactagaggagtttgtgtttgaataattattttcaagcactacacctcttaggttttaaggggcgtagttaaaatgagtgcattacttccaggttggaaacgcaaaacggctttatttttatcagctcaaacaatttctttgctaggttcttccattgtccagttctctatcgtctggtatatcaccctaagtacttcatcgggggaaatgctggctatttcggtgctctgcgcatttcttcctcaggtattgatctctttatttgccggtgtttgggcagatacttataaccgtaagtggctcagtattgcctctgatgcgttaattgcattagtcactcttggtttagcaatctcttttatgctcggatttaagagcattgagctgttatttgtcgcactgattgtccgctcgttcgggacgggcatccaaatgccggctgttaatgcgattattccgcaactcgtgccgaaagagaaattgctgcgggtcaatggtattaatacttctctgacttcactgatgatgttggcatctcctgctatcagtggctttttatattctcaaacttcaattgagaatatttttttagtggatgtaacgactgccattatcggcattagtattgttgcgtttattcctattcctaaaattgtttctggctccatgccggataataaatttcaggcaatcttagcgggtttccgttatttgcaagagaataaactaatcagaaatcttttgatttttctgatttgtgtctgctttctggttagtccggctgcatttttgacacctttattagttaacaggacatttggggaagagccgtggcgtttagccattaatgaaatgacatttagtgctggcgcggttttaggtggattgctgatttctttctggagtgaatataaaaataaaatgcgtataacggcagtagcttgtgcgttgtttggcatatttatgatcgctcttggtaatgcctattggttcccgttttatctggtactcaatatctttttgggcatggtaacaccttgttttaatgcaccgataactgcggtttttcaggaaagagtcgaacctgaaatgatgggcagggtattcagtttagttcagattgctatgtcttgctctctaccattaggtatggtgctgtttggccccattgctgactatattagtattcaatctcttttaatgatatcgggtggattgatattactgacgggcacactgttttttatgtttaacggagaagtcagccgagaaagtagcagcgcagtttaatcggacttaatgttgccagttatgcgataagcgcagcgccgtgaattgctggtgcttcaattacaaccgtgcagctcttcgctactgcctttggagctgcattggcggggatggtggtgaacctttcaggatttaatgaaccgggtggtgtaacggggacagcttctgccgcatactggttattcttgttatttgctatcgcaccattgctggcgctgtttaccgcatggagagcagcgaagattaggttagtggctgagtagttctgttttatggtgcgagggatggattatgatatcgacgtttgttgatgacacgtcgatattttcctgttttttcgacgcacggtttccgcatgtcgattccatcgacatatcgctaacacgtgtcgaaatttttcggttttatcgacatgaagtttttacgtgtcgatgccgtcaacatatactcgcaacgtgtcgaaaaaaataggaaatataaacatgacatggcagcccgatgcgccttttaatgctattcccttattgccaccaaccgtaaaggtgatggagtctattgcggtattaaaagcctgtatacctgccagagctgcactggctgagcttaagcaagctggtgaattgtcgcctaatcaggggttactcattaacttgttgccgctgctggaagcaaaagacagctcagaaatcgaaaatattgttactacttcagacaaactgttccaatatgcacaagaagacagtctggctgatcctgcaacgaaagaagcactacgctaccgcactgcactttatgaagggttcatacaattaactcggcggccactatgcacgaatacagcgattgaagtttgtagccgactaaaagctgttgatatgaatattcgcaaagttcctggtacaacgctgagtaatcaggcaacgggtgagattatttatacgccgccagagggagaatctcagatacgtgatttactcagcaattgggagcaatttcttcatgcagaagatggaatcgacccattaatcaaaatggctattgctcactaccagtttgaggctattcatccatttactgatggcaatggacgtactggtcgtatcattaatattctctatcttattgaacagcagcttttgacattaccaattctttatttaacttgctacattgtacaacataagagtgattattatcggttgctttcccaagttactgctgctggcaaatgggaagagtggattatctatatgttaaccgcagtagagcaaactgctaaatggactacggataaaattgctgcggtaagagaattgattgaacataccagtgagtatataaaacaaggtttgcctaaaatttacagccatgagctggtgcaggtgatatttgancaaccttatgcccgtattagtaattggtgagangtgatatgctnaagcgtcaaactgcttcggtttatttaaaccagttgtgtgatattggagtattacgagaaattcaggctgggaaagaaaagctatttgctcaccctaaactggtacagttaatgactaaggatagtaatacattgagttattacacagtttgaaaagtgtctacatcaaatttattaaaaatctttgtgaataactggtaaaaattgaagccgaacatgatgtagtaaaaaccgctagctttcattgttgcagtactgctggctatacaacgataaagagctaaacgtaatttgcagaagtgacttattctttgtttttttatgatggagaggctaatactctccggttgccattattctccggcatactgatgatatcagcagtttccatctgttcaatgatacgtaaggctctgttatagccaacaaaataatgtgtcgcttaaaaatttcttacaatacatatatccacttcgctggcatgaccttaaaaataagtagttactgcgacaatagtaaattttaatagcataactaattgatatttattaattattcattatttttgtacttagggaagtggggggggggagctttttcagataagagaaacactatagcttttttaacttattgggggtaacttatcagaatgattatagtgcgatggtgatgaaatatgtctttggatgtagcttatagcattgaattaaatgagtatatcgaccctgatcgagcttatgatttgtattggtctggattaattactaataaaaaattatttatatgtcctggcgaagattgttctgcacaggttacttgtgcgaatcttgatgaagatatgcagaacatgcgtgtagttcctcattatcgcatttatggtaaacatcatcctaattgtgaaatagagagaaaaattccgcttaagatattaagtgtcattgaaaatgctaagcaaggagagaaaaagacacttgatcagtcgatagttgattcttttatacttcatcgcccggatagttattatgaatctaagaagaaggatgataataaaaatcatggaaataagcggaataaatatctatcaaagtcacatgctcttaatctgaaagaaatcggcaatatagggaaagtctactcggttagaactatcgtaagtcgttatataaggtatattaaggataacacgttaataaataggaaattgaatatatctggaatggatataccatattctggggtgtttaaatgtatttgggagcagaaaatagattcgttgccagagtatgggattatatattatggttgggcttatatagataagtatgaaggtaaaggatatcgtattaaatttaaaaaaaagataaaaaactcacatggtgaattgctacaaacaacttgttttatatccaaaaagctaatagataaatatcatgtaaaaaaacttgtcatcaagaggttgtcaaaaataatacagacacaaaaatctacagcatttgtcttcatttatgggcggcctgaaataattagatcgaaaatcaataataaagagtatgttaatttctatgttgataacttagactacattgatattaatgtagataatcctcttcctaaaagaaaagtttaaatttaagtatggggaaaaacagggttcttagctgagtgagctagtattttttaccaacgttccgtaaattctgtgccagcgggctaacacttttctcactagtagcggtatctacagccagattttccagtgtattgtcgttatttaaggatatgtatgccattacgatgcagtatacaatcgtggaatgcgataatttcctgcgcattcacccaaatcatcggtaagtcaacgtctctacagtatatctgtggcgctgcataatgtgaacaaactcggcatccagtttagcatttcgataattctcatttcatttatatccgttatcttttaagtcacctctttgttggttgcatttactcaccccgatcacatagttgtccatgttcccggggattcgttcccttgccgtcgcgatgcacttgaaatccatagggtatatatggcagagtaaaataatgtcaatgcatggtgttgattttgcttttaatttttccaaccgaagggcgaaaaaacaatggagagtttaaagtatctccgaaggagatgctgaaagttagtccttgctttgaaactactattcttttttaattgtaatactgaaccaaatttctataatttcgattacttctacacatatggagttaacgatctcatccatacgctctatatctaattcatcatcaattgtaaagccaaaggataatggaattataagtatatttttttataggcttcttttttattttcatcaagtaaggttattactccatgagattttctatttttaatgtataattctattttttcctttgcaccggtattaaaattcaattcatcatcgaatagagcattaaaaagtttctttttgtttaatgccttcaatagatcttctttatcgcttgggttttcttttaaataggcgtagaaatctcgttctttgtttaatatgttatcattttttgtatttataatcgcaagtttatagttgtatagacctataaaaaaaacaaatacaggtataaatatcagcgattgtttcaagagagaaattggtgttttgaaaatttgttctgccgttaaaatacactcttcagagaaacaaaaaggtccatacttcgtttgaggataatatccaaaaaaaccatgattgccgtagaaatcatcgagaaaaagcaaactgtaataagtgaaattattatgtatgatattatgctggttagtgatgctttaattttcatttttaattggacttattaattttagacgagctttgaactcatttgcctctacaggatacagtttcttcaaaatttctaagcgaaatatgacttgaaaataacggcttctatatctttcagtgctaccaaaagtagcatgatcttttgataggttagatatcaccctattaattctttttatttctttatgttctgggaggggatcgcaatgttttgccagcaatttttttagaagaggataatcaggacaattaactcgttttaatttagtgattttccctttgacagaaaaatagacgtcatgataattcttctgcattctgatattatcacgattatatcctgtttttacaactcgctttacttgtgtttttatatttattctttcattctttgtaaatcgtggagttgtttcttctatacatagtccatgtactttaaacgattgtggtgaattagctgataataattgagtcttatctttattcactgataattctttctgcgttataaattctgaaatgatagtttcaacaaatttccaatcaccttctttttttaagcgagatactgttatatcgtcaattaaacgagtgtatctgaaaccgagactacgtaggtaatttaccttatttggctcacaatcataaaaatataagtttgctaaataagtacttgttggggcaccttgtggaacaaaaccatcatacgtagtaagctttgttaaaatgtttgatacttcatcagaaaacttaaataagtctttgaatatattgaaaacaaattttgttttcattgtagggaaaaaattttcaatatcaagtttgataagaatttttgctttacaatgttgatgagcacataaaatgtaatcgcgagggttttctttgtctggtattgaaccatacaaataatcagggaaattaatttgattaaatattctattgtttatttttcgaagaattgatttaagcattcgatttggtgcataaacaattcgttcaccaccgttttttttcttaatcggtggcttaatataatatgcgttttcaacaccatctctaagcagactttcaaatttttcaatatcttttatccccagcaagccgattaagctttcttttctttgaatgggagtaaaagtatccttaaacgagaaaccctttggcatgtaatccttcttagataaaagttagcgtcctcacggccaagaagggcagttgaatccgaaggaagcaacacaaaagtataaaatccaccctaccttcactaactttttccaactgtgtactgtactccgtggtctagcttttgcatggctcgccagagtgcacccagaaagacctttcggtcgtcctagacttaaggacagatctttttgctttaacgcttcctttttcatcaagtgaggtcttagtcccacgaaagtcttttaccagaaatcggattgctcttaaagtttttttattcagtatctaataactgatcttcaagacgggaattgctagatttgctaatagccatgtcgttagtcctctaacggtgtagttagcccctgtctggtactgctaatacctttcaggggagagattggtgatgagatacttttgtggtagggtacgtacctataaaagccatcatagtcaaaaaggtacgtacatgtcagcgataaaacgcgatacgaaaaaatcttcatcggcaggcaaatctccgactttccagatacggatatcacctgagctacgtgaacagcttgatgaagttgtggtaaaagaaggtgtcagcttgggcaactggttcaaagaactcgcccgtaaagagcttcgtaagcaagggattgagccgaaggggtgaacgggctactgtttgctatttaaatctcccttgacattgtatatcagttgtattaaaatccactatgtagattatgtggcggtagaggcatccccacgttaaatagaacaacctcattggattatgtggcggtagaggcatccccacgttaaatagaacaacctcattggattaatctacacggaaagccctccattggagggcttttttgcatagagaataagaatatgatattgcgccagatcaaacaagatgtctacaacaggctttgtgaaaatagaccgcaagttttagaaaaaaatagggggtatggcgttatatcgattactttaaacggacttacattcgcagtccctttacgaagtaatctaaatcatcctaatgggttcaagactatcttcataaaggaaaaaaaatgctggagtggcttagattactcaaaagctttactcattgatgttgatgatctagaaccacaagcttttaagctaaaaatggaaaaagagtatgaaaagttaaaagcaaacgaaaaaaagatcgaggtggaatttggggcttatgttcaaggatacattgaatacataaatactggtgagggtgatgatcgttgttataaatttactacactccagtatttccatagagatttgggcttatagccactaattatattaatattgctaagttgcccatatttctagctgaatcaaagctatctgtaaattcagctagtcagctttatatgcgagtggttaaataatggattcaagtaatttagcaactttcaaatgagcttctttcctttcttcaaaataatcatatttggccataaatgctttcaacacctttgagcttgtgattaaggcatatgaaaaggaacgaaagagaggcaggtagactacggcaagctcgtcttaaatcatgaacagagaacctctaaaatctgtccgatgaaatgatggaatatcagttgcttgatcgtgatcgccttagctggcagcatttctgtcgtctggccgatgtcatcaataatattcctgaccgaaataccatttgacattttgaacagcgtatcgggaaagatggcgctcaggctttatttgaagacgctaaccgccaattatccgctcagggatttattgcctgtcgcgggcaggttattgatgccacgttgatctcaacgcgtaagcaacataatacccgcgacgaaaatcagcggatacgcaaaggtcaccccttaatgactggagcgcgcacaagcgctgtcaaaaagataccgaggcaacctggacgcaaaaacacggtaaaaattatttttgtatcagcttcttgtatagtaattgatagaattgagtggactttactcaatattctgaatctgctccctcatctgttcgattagcactttcaattcaatagcggagttagtgatatcggcgttgatagatttggaggcaagcgtattagattcgcgattgaattcctgcatcataaaatccagtcggcggccgacggcttcttttttctttagaatattacgggtttctttggtgtgggcatcaaggcgatctaactcttctgccacatcgaggcgttgagccagtaaaactaactcttgctcaagacggttattttcaagctgtacctgcgcttcttccaatttggtttgcaggcgttcccgctgccattgcatgatttcaggcatttgttggcgaactttaccgacttcttcggttactgcgtccaaacgttgttcaatcataattttaagtgcgttgccttcggcttcacggctttgaataaaggcatccagtgttgtatccagttcttgcaacaattgagtgttgatagcatccaggtcttgctcttctgcggccataacgccaggccaacgcagaatatcaacagggttgatttcaccttcgttgctctgttgtttgacccagttcgccgcattgactagctgttttgctaaagtttcattcaggataagttcgccttgagagcgtgaatccagttcaaaacgtaagttgcactcaacttttccgcgagtcagacgggaacgaatgcgctcacggatcaccggttccaagcttctgaattgttctggtaggcggatataagtttctaaataacgctgattaacggagcgtagttcccaagccgcatttccccattcacttttgatatctcgccgtgcaaaagcagtcatactacggatcatgattcgttcccaatttaaacaaaagattaagagattataacgctcgttgtagatgcaggataggaattagccctgttaggccgtataatgcgcccccaataatgatttaacaacggagataacactatgcgcccaacaggaagagcggcagaacaagtgcgtcctatcacgataacccgtcattatactaagcacgcggaaggttcggttctagtagagtttggcgatactaaagtgttatgtaatgcctccgttgaagaaggggttcctcgtttcttgaaaggtcaggggcagggctgggtgacggcggaatatggcatgttaccgcggtctactcatacccgaaatgctcgtgaagcagctagaggcaaacagggcgggcgtacgatggaaatccagcgtttaattgcccgttcgctgcgcgccgctgttgatttaaaaaaactgggtgaatacaccattacactggattgtgatgttattcaggctgatggcggtacccgtaccgcttctattactggtgcttgtgtcgcgctagttgatgcgttgaataaaatagttgaagcaggcaagctgaaagagagtcctctgaaatcaatggttgctgcggtctctgttggcattgtggatggtgaaggtcgttgtgatctggaatatgtggaagattccgccgctgaaactgatatgaacgtcgtgatgatggaagatggccggatgattgaagtgcaaggcactgcggaaggcgagccatttagtcatgatgagttgttatccttattggctcttgccaagggaggattagaggatatttttgatgcgcagagaaatgcgttaaaacaaaatgcattaaaataataagttgatcaggcgacatgatagtcgccttttttatgcctgttgtatgacgataactatgactcaaaaagaggagagacaccaatgaaagcctatcagcgcgaatttatcgagcttgcgctaaaaaaacaggtactgaaatttggggaatttaccctgaaatcaggacgtaaaagcccgtatttttttaatgccgggctatttaatactgggcgtgatttggcgttaatcgggcgtttttatgcagcagcattgttggatagcggtattcagtgcgatttgttattcggacccgcttacaagggtattccaattgcaacaacaacggcagtggcactggcagaacatcatgatattgatatgccatattgttttaaccgtaaggaagctaaagatcatggcgaaggtggtactttggttggtagcccacttaaaggcaatgttgttctggttgatgatgttattaccgcaggtacagctatccgtgaatcgatggagattatcaagcagcataatgcgacgcttgccggcgtgatgatttgtcttgatcgtcaggaacgtgggaacggtgaaatctcggcaattcaggaagtggaaagggattatggttgcaaagtgttttctatcattactttgaatgatttgattaattatttgagtggtcagccagagatgaaagatcatctggatgcagtaaaagcctatcgtgcgcagtacggtatctgatagataagcttcaaaaaaagccctcgcccaataacgggcggggtgagtagtagaataacttattgtaactgagccagtaataatggccagcgtgcttcaaattcctgcgttggacgatagtggaactcagagcgtacaaaacgtgaaagcatcccttcacaaaatgcgagtaactgagatgctaataacgactcatcataactgaaaccttgtccatcacgtaattttttctcttttaaaacttggcggatctgtacttcaattcgttcaaataactgatttatgcgcccttgcagccggttttgttcaaacattagagcatgacctgtcatgatgcgggtcagaccgggatttttttctgaaaaacccaagatcaggaccaatatcaggcgaatacgagttatggtatctttttcatcttgcagaatcaggttaatccgtgaaattaatgagtcttcaatgaactcgatcaagctgtcaaacatccgggttttactaggaaaatgccgatatagggcagcttcggaaacacccacgttggcggccagtttagcagtagtgatgcgatggctaccgtcactggattgcaacatatgcgccagcgcctgcaagatctcctcgcgtctgtttcttttctttgtattttcgttttctgccatgtctgacaagacctttgttaagaacagcaaaacaaacaaatcagtaattctttgctcaagggtattttgagcaaagaatatgataatgggttatacccgtcatctttcaagttgcctctttgttggctgcactcgctcaccccggtcacatagttatctatgctcccggggattcactcccttgccgccgcgatgcatcttgaaatccatagggtataaacggtatggtcttacagagatttattggcgaccggaatgaccgaaaccaccgctgcctctttcgctggtttcaaaatcttctaccagattgaattcagcctggacgacgggtacaaaaactatctgagcgatacgttcgcctggttggatagtgaaagctttatcaccacgattccagactgaaaccatgagctgaccttggtaatcagaatcgatcaaacccaccagattccccagaacgacgccatgtttatgtccaaggcccgaacggggcagaataacggcggccagttgttcatcaccaatatgaatagcaagcccggttggaagcagttctgtttggcctggagccagttctaccgcattgtccaggcaagcccgcaaatctaaacctgcggaacccggtgtggcgtacgttggtaaaggaaattcttccccgatacgtgggtcaaggattttaacgtcgatttttttcatcatagcgtctgactatctcgtctaataaatggtggctaagtaataacttattactatgaggtaagcggatttctccctcatgccagaacaaatgtaatgcattagtatcactgttaaagccgtggccagtaagggatacatcatttgcacaaatcagatccaaatgtttttggttcagtttttttcgtgcgtattcttccacattctgggtttcagccgcaaatccaaccacaaaggggcggttttcttgcattgctgctacattggcaacaatatccgggtttttgatcagggtaaaagtgatctcatcaccctgttttttaattttttcttcggcaatctgtttagcgcgatagtctgcaaccgcagcacaaccaatgaagatattctgtgaacccgctactgcctgtgcttgttcattcatttccagagcgctggtgacgttgattcgtttgactcccggtggtgtcggtaaattaacggggccagtgatcagggtgacttctgcaccacgtgttgccgcagcctgggcgatagcaaaccccattttgccggagctgtgattgctgataaagcggactgggtccaatgcttcacgggttggtccggcggtaatagcaagttttaggtgagctaagtcttggcttgcttgaaaatgttgttcagcgagttcgacaatcgccatgggatttagcatcctgccgggaccaacgtcaccacaagcttggctgccgttgtccggtccccacaggagaacgcctcgttcttcaagatgcttgagattatgttgcgttgcttgagctcgaaacatttgttgattcattgcgggtacggcggcaattggggctggggaggccaaacaaagagttgttacgagatcatttgccataccgacgaccaggcgtgccagtaaatcagcagtagccggggcgagaataatcagatcagcccatttaccaagttcaatatgccccatagcagcttctgctgctggatctaacaagtcatcggaaacgggataaccagaaaccgcctgcaacgtcattggtgtaataaacgattctgctgctggtgtcatcactacacgtacttgtgcgccgcgatcacgcaggcgacgtactagctcgggagttttgtaagcggctattcctccgctgataccgagcacaatctgtttgccggaaagtcctgccatcatgattgtccgaatatataagttgcaaggggccaagattttatcacaagagattacagagttgagcagagtctgagctttgattgtaaaaaagaataagtttgcgagcggctacgcagctccggaatatgatattcgcccttatatttaaggcgtggaatactgtttgtatcaggtgaaacagagcagggagatgaatatatgggaattgatgtcgctgaaaatacaggagaaatatattcaaatttagctcccagagaaaaattgttggcttatggttctgtttctctaacagatgctgagttactggctatttttttacgtaccgggaccagaggacttcctgttttacgaatggctgaatttctactgaaagaatttggatctttgtaccatttactctctgctgattatgacactttttgttctcataaagggatgggattggctaagtatgcacaattacaagccattgcagaactggcaaagcgttttttttccagccagtttatgcatgaggatattatgagtagtccaagtgtgactcaagagtacttgcaaaacctattatcagggcgcgatagggaaatatttgttgtgttgtttctcaataatcaaaatagagtcatctgtcatgaggagatgtttaaaggcaccattaataaagttgaagttcatcctcgtgaaattgtccgatcggcgataaaggtgaatgcttcatccgttattttggctcataatcatccatcaggtcatgcagaaccaagtttggcagataagattgttacagataaagtgattgatgcctgtaatttggttggtgtaaaagtgctggatcatctggttattggtcggcaatgttgtgtttcatttgctgagcgaggatggatttagctaactttttcaagatccttatggatctttggttgtgcgggacttgagcgtcagcgattgagggcgtatactacgccacctttgaggatctttggtttggcgagaagagcctatctcagcacattttctgagtaaatgtgagtcttttcagtggaatttgctgagatgggctcctaagcctgacgaggcggccatacccaatacaaagctcgagctgatttgatttttggagaatagacatgtcccgagtctgccaagttactggcaaacgcccgatgagtggtaataaccgctctcatgcattgaatgcgactaagcgtcgttttctgcctaacctgcattcccaccgtttctgggttgagtccgagaagcgttttgtgactctacgtgtatctgttaaaggtatgcgtgtgattgataagaagggtatcgatgcagttttggctgagcttcgtacccgcggtgagaagtactaaggagctgaaaaatggctaaaggtattcgcgataaaattaagctagtttcttcggctggtactggtcacttctataccactacgaagaacaagcgtactatgccagagaaactggaaatgaaaaaatttgatccagttgttcgtcagcatgttatgtataaagaagccaagattaaataattttggttgatttgaaaaaaacccgacttaggtcgggttttttattgtaagaatattaaacagatattcactgattcttctttctatttcatagaaattttgttattcgtagacgtaagatgctgtttagctatactaatgccttccggtaggcggaatatagaaacaaaatggctaaagaaaaactaaatattttacatacagaatcatcttgtggttggggtggtcaggaaatccgtatcctgacggaatcccaaggaatgataaaacgtggacacaaggtggttattgtctgttgtcccagttctaatatctaccgtgaagcaaaatcttatggtgtgccggccgtagctctgcctattgaaaaaaagcggctgtcctgcttgcttgctatgcgtcgttggttgaaaaaagaaggccgtcaatttgacgttattaatacacatagctcgacggatgcatggttggttgctgtagcttgtgcaacgttaaggcatatgccgccaatggttagaaccaggcatgtttctactcatgtttctaattcaatatcaactcgttggttgtatctgaaagcgtgctggcatattgcgactaccggtgaaaaactacgccaacatctgcatgctaataatcgttatccattacagcatatgacatcagtgcctaccggcatcgatttagatcgtttccgaccggaagataagaaagtttgccgtcaacggattgggattcaaaataaaccgacattaggtgtcgttgcgaccatgagaacctggaaagggcatcgctatctgttggaaagctggaaagttctgcatcagaaatatcctgattggcaacttttgtttgttggtgatggtccacaacgtaagtcattggaacctttagtaaagcgagaaggtttgtcaaacagtgtcatttttttaggtaaccgtcaggatgttcctgattgtttgaatgcgatggatttatttgcattaccttcttttggtaatgaaggcgtgccacaaggcattatgcaagcaatggcgtgtgggatacctgttgtatcaacctccgttggtgcaattaccgaagcggtagttgatggtgaaacgggttatatcgtggaacccagaaatacagagttattgacgaaaagtttagagttgttgattcataataatgaactgcgtttgcaattcagtcattcttcattagagcgggcaatggctttatttggcatggataatatgttggataaaatggaaaatatcttttttcacagcattaaaggtaaaaaacgttaacattatttaggatttattctggtcttattctttggtttatggttttgggtaatgttcaacttattgatattaaattactttaaagttgattattagttaaatcacactgttgtggtcaatcgtatacaaaatggtttttttatatattttgttgaattttatggcagattaattagataattgtcttatgcagatcaagaatattctggtcattgttatagcacgtttcggtgataccttattggtaacgccagtgatccgtgctttaaaacagaagtggcctggtgcaaatattgatgttatggctcataaaaggactaaacagatccttgaaaatataagcgatatcaataaattgactgctttttcgaaaggtaaggcaaaatggtgtggttggtttacccgtaagcattatgatctggctttagtatacagtgacgataaacctttattacagtatgcgaaacgtaaatcacacttaacggtttcattttcagataagtccgcgttgcaatctggttggctgacagtggaaaagccaaaggggttgatgccagctcagcaggaacgggccatgcttgctagtgcggtagatgttgaggtcaatgattggcggttgaattattgtgtgagtgaaaaggagttacactttgccgagggttttatacggcagtatcatttagagaacaagctcctgattggttttcagttacaaagtttcccggcaaaagcttatcgtgattggccggttgaacatttttaccaattagcgcaacacatttgtggccgttatccccagtcgcatattatgttactaggcagtgctgacggtaaaattgctgcacagtcactggcaaaaagattaggggctgaaaagtgcacttcattggttggtagactaacaatgcggcagaatgcagcaataatgagtcaacttgatttgtatgttggtgttgataccgggccgacacatttagctggcgcattaggtatcccgatggttgctatgtatcatagtttccacccaggccgttttttggcacctcaacagcattcgcatttggtagttattgaacacccggttcactatatgcaagccacccgcaaagactcgatgtctgcaatatctgttgaacaagtctggcaggcaacgcaaaagttactagaaactcagttgtcaggaagaaaagatgaaaataggtttggttgatgtcacggtaactatgtcttacggtggtattcagacggcagtctgggaactggcgaaagcgttgactgatgccggtcatgagatccatatttttggtggaaagggtgatattcaaccagaactcaatgggagagcaatccaggttcacacttttccattcattcccagagagaaagtcattaatattggtcgacgttttcaacgtattattgaacgttactcatttgctcgccatgctcgcgatacagttgttactgaggattttgactgggttattctgacgaagccatttgattttttctggcctcgaatgatgccaaaagagagccgcactaaattttgctatatgagcggtggcaccagttttttcaagggtgacagaaagctgagtaagcgaatttcagcttgggtggcatgcagccattttaatgcctggcagattcagcaccattttaaacaattcccgaaggtgatttacaatggtgttgatattaataaattcaggccgatagactcttctgtcagaactcgtcttgggatcagtgataaaacatttttgctgacctttgccggccggttggttggctggaaaggcatgcatgtggctattgatgcaatggctcagctacaggataaagatgttaaattgctgattatcgggtcaggtgaagatctgaaacacttagaaaagcgggttgcggtattacggctgaaaaaacagataatttttcatccaccggtaggacatgatcagttgcctgaatattatgctgctggtgatgccgggattttcccaagtattggtgatgaagcatttgggatcacaattgcggaagcgatggcgtgtggccgaccggtaattgcgagttatattggaggcatacctgaagttgtcggcaacgaaaataattcgggtattttagtcacgccaggcgatgcttcagcaattgccgatgcggttaattttttattgtctcaaccggacagggggcaaaaaatgggaaaagcagctcgtcaacggattgaaacaatgtatacctgggagcattcggcaaatcgtttactgaaagcgataaataatgaagattgcctatattgatccctatccggttcctgattatcgggtagcatcattgcaaattttgcagaatgttgatgcgtttgctcgccagggagcctgcgtatatctggttacaccggaaggtaaaaataccgcagaagaggtactggggcgttcattgtcaccatcagcgagactgatatctttacgcaatattcggcgtaaatggtattttccgtttaatacccaaaaaatgttctatttccaggtttcccattggttgaagagaaatgaggtcgatgccgtttttacccgcaatctgaaaatggcaaagtatttattatgtgaacatccagaaattccgctattttttgaaagtcatgagatttttgcccagtcatttaaagaatcgcatgatttaagtaaaaataaaaatcagcgtaaatatcagaagctgagagaaattgaacactttgtttatcgtcggtccaggattactttcgttctgacgtcgttactccgtgatgatattattagtgaatataatgtcagcacgccaatagttgttgcgccagatggcgtggatatgttggcagtcgagtcgatgtcgttagataaacgtgtatcagacgatggtgaattaccaacccagatcctttatttgggcagtttgcatcgttggaaaggtgttccgacggcgatcaaagcgatggcttaccttgaaaatgcagtattgaatattgctggtggtgaaccagggcaaattcagcaattgcggcagattgctcagcaaatgggggttggcgataaaatcaattttcttggttttattcaacctaaattacgttttcagataattgcagataatgatatttgtttgttgccattaacgaaaaccagcatcggcagtcgctatacttcgccactgaaattatttgaatatatggcgatggataagccggtggttatctctgattttctttctattcgtgacgtggctgatgaaaatgcggtcagttttgctgacagtgagaatgcagaaagttttgctcaacagattcagttactgagggataatccagaaaaagttaaatcacaagtcagttatgcaaaaatgttggtgacagaacgttttaattgggaacagcgagcgaagctgattatgcagacaatatcaaaggatatttctgcataataatcggtttaataatatagccgagatatctggttaatcgtttttctgctgatatagcgcaatcatcaggccgaatagaatacctatttcattgatataggtattttcaaaggctcctcgaacgataaataatccgatgaatcccgtcaatagaataatactggcctgctttattacgccattgttacggctaataatgtagctacttgtatacagcgctgagaaggtcatcagcaaagtggtaatcaaaccaatgattccaccggcaaaccagagtgccagcaagatattgtgggggccgatggatgtgcgatatatccagtctggatagtcagcaactcgttcgttgtagactttatgatagactttattgccataaccgtagcctttaatggggttctctagaatcaactcaaaagcagttccttgtgtgccatttttataacgatggctgctatcagtttgagtcagtttccaaaataataacttagtattttcattagcgattattgtagtgtgagaaagcacaactgaaaaactaaggattaaacccactattatggtcagcttccattcccgattaatgatgatgataaaagccgtgatgacggcaatggcgacccaagcgccacgagctaaggtacctaataacaaaaacagactgatagcggaagcagcagccagtatcagccaactcactaaggtatgtttcttccacaatgcccaagtacaaagtaagatcggaaaatagaaaataaaaccgtaagaaaattctcgatggttgaagttggtaaaaggcatttcacctttattgtagttaataatgtatttaccaacatcagttaggcatattgccagcataccaatggcaaatgagtacagaatcatcttggcaatactttctttattttctttgtacagtaccacaggaaaagtaaaactgaacaataatagcccatttaagatgggcttattcatctcttgaaaactcaatgcgggatcgacggaaatcgctactgaatagaacattgctacgatgaataacataatggacagaaaaagtgaattacgcatggagtgcatcacttggcgaaaatctgtcactagataggttagtgctgtaatgccaataagcacgataaccagatttttatatctcgttatatcaggcagataaacaagggctatataaatcccaatgatggataaattccataatgatcttttatcacgacttttaatgttaaacatattcatcaatctgctttcatttctgttgagtttggttggaaataatacatgaaaagattatcttaatctgctcggatgcaatagagttgaaacagtatctataattaggagttattaccatgccagaactaccagaagtagaaaccagccggaggggaatagagccacatctggtagggaatgtgatccagtatgcggtagtcaggaatggtcggttacgttggccggtggcggaagaaattatgaagttgagtgaccagcttgtgcttagcattcaacgccgggccaaatatttgctgattgaattggcaaatggttggattattgtccatttggggatgtcgggcagcttgcgtattttgccagaagagcgccccgcggagaaacacgatcatgtggatttagtgatggcagatggtaaggttttgcgttataccgatcccagacgatttggtgcatggttgtggagtgatgatctcgaacggtgctcggtattggctcatttagggcctgagccactttctgatgattttaatggtttttatctctacacccgatcaagtaataaaaaaaccttgattaaaccttggctcatggataacaaactggttgttggcgttggtaatatctatgcgaatgaagcgttgtttactgcccatattcagccggatcgtcccgcgcagactttaactgagcgtgaagctcatttactggcggaaacgattaagaaggttctacaacgctctattgagcggggtggtacgacactcagagattttctgcaatctgatggtaaaccgggctattttgctcaggaattgtttgtctatggcagagcaggagagccatgtcgaatttgtggtgaacaaatagagagtattaagcttggacagcgcagtactttcttttgccgtcactgtcaatattagttgatatcggatagttcggggaggcgtttcatagggaatattctacttttttgtgccgcctccagtgaacggagtaaattacttgcccagtttttttagcatggcttgggcgataggttctggcaagaatgatgagatatcgccatcgtggagagcgacatctttaatcaaggatgaagataaaaacgagagattttgtgatggcagcagaaaaacgctctctaattcgggcataaagtggcggttcatattggcaagctgccattcatactcaaaatcagatactgaacgaagaccacggataagaatatttgcttgttgtttttttgcaaaattagccattaattcacagaaacctatcacctccacattatccagatgtgaagttacctcttttgccagggtaatgcgttcatccagagtaaacataggattctttctggcactgttggcgatcgcaaatagaacatggtcaaacatatctgcggcgcgggtgacgatatcgatatgaccgtaggtaacaggatcaaatgttccgggataaatggctttggttttcatcaatttttgcccttttgttgtctcttttcccacaatgcaacgtacttattaaacgtatattgagcattgacaatagccaacactaacccttgtttaccatcaagaaagccagctcgcaacagccaggttttaaagaaagccccaaaagtgtgactgaaaattgagaaataactgcactgtttaccttgttcatcgcgctgttctgcccaggctttagcataatttagctgttttctctgaaattccatcaaatcacggcaagtaagatgaagtaaatccccttgcaaaataacgactggagcgccatgagtttcaagggattcatgcacttgattatcattgtattgataacgatcacgggcgtagagacgaatgaccctatctgggtaccagccgctgtgtttcataaagcggccaaggaacaagttccggcgggcacaactgtagactttattgttatcaatatgtgccagagtctgttctatggatgctctgagttctgatgttacgcgttcatcagtatcgatcataaaaatataatcgccagaagcgtattgctgagctagctgacgctgacgaccaaatcccggccagtgagtattggagaatacttttgcgcccattgcccgtgctatctggcaggtatcgtctgagctacccgaatcgagcacgatgatttcatcagcccaacggactgaggtcagacaatctgctatcagatccgctgaattcttagcgatcatgacaacagaaagacgttttttgtcactcattcagtggctccgaggtgggagatagggttccagcagtttaagtagacgttgaagagccccctgattttcatgcagtacttctgctgcgtggcgaccataatacagacgataatcttcgtcagtcagtaaactgttgatctcggtgaataaagagtggctgtccatcacggtaatcagaccattagcctgattcagcttggtgcagatatccttaaagttaaaggtatgagggcccatcagcaccggaatagcatgggctgccgcttctagcgggttgtggccgccacgttcaaccagactgccaccaacaaaagccagatcggcaataccatagagcagcatcagttcccccatcgtatcgccgataacgacctgaatattggcgtcagggattttatcagaactgcgaagaatatagctgagtccggctttctttgttaattcttcagctttaataaaacgttcagggtggcgtggtaccaggatcagcagcaggcttgggcattgtttcagtaacttgcaatgagcatcaagaataatactctcttctccatcatgggtgctggtggctatccagacaggacggtgagccgcccattggcgccgtaatgtcactgccttggctgccaattccggtgttactgagatatcgaatttcaaactacccgtgatagtcagttgagagcgttttagacccagctcaataaaacgttcaccatcttccggattctgggcggcaattaaggtaatgctgcgcaaaattgtttttacgaaactccctactttttgatatccctcagcggaacgggcagacaaacgggcattagcaatgaccagaggaatgttacgttggtgaagttggaaaatcagattaggccaaagttctgtttccataataatgactaactttggattaacttgattgagaaagcgctccatagaaccggggagatcgtatggcaaatagacgtgattaacatcatttcccagagcggaaagcactctttctgagccggttggcgtcatcgtggtcacggtaatcggtaaaaaaggatagtgatggcgcaaggctctgactaaagggatggcggccaacgtttcaccaacggaaacggaatggagcaggatgcctccagaggcaactttaccggcacagaaaccgtagcgttcaccccagcgctgacggtaagcaggggcttggcggctgcggagcaataaacgcaaccaaatcagaggctggataaggtagagaagtacctgatataaacgcagtaacattctatcaaattcacttatataaattagcgtcaatagtatcacattgcggcaaagaaagtatgaaaatgcgtatggcttctaggatctgaacagaattagaaaggtaaattaggatttttgcgtaagatcgtgcttctattatatatgaaggtaaagcggattttctgtagcttctgcacatgttgcggcagttttttcttttatctgtatctttatactgggaatgcaatgagtaaattacaagctcaatttgaccgtattctgataataaagttacgacatcatggtgatgtattattaattacaccggttattaatacccttaaggataattatccggcggtggaaattgatgttttactctacaaagaaaccgaaccaatattggctgattttcctgctgtggctaatctattttctatagatagacaatggaagaaacagggagttaaaacacatcttggtcatgaatggagattgcttaaacgattaaggcatcgtcaatacgacctagttattaatcttactgatcaatggtatagtgcatttgtgacacgatttactggcgcaaaagtgcgtattgggtttgatttagcaaaacgacgcagcctattttggaaaaaatgtttcacaaattttgtgccgacagagcatagtcagtttttgcatattgttgagcagaatttgtcagctctttcgctgttaaatcttccgttaatcaacactacagtgacgatgagttaccgccagcaggataaagaggctgttttgatgcttcttgataagcatggtgtagatcaaaaatatattgttgtgcaaccgacatcccgctggttttttaaatgttgggatgaaaaaaagatgagcaaaacgattaatgcattacagtctgatggttggacaattgttgttacctccgggccagatcgtaaggaggaagagatggtggcgaagattttatcaaattgcctaaaagagagagtgatttcttttgccggccaattaactttgcctcaacttgcagcgctgattgatggggccaatttattcatcgggatggattctgttgctatgcatatggccgctgcgttaaaaacaccgggtatcgctttatttgggccatcaaaattagtattctggcgtccgtgggaagcgaaaggtgaagttatttgggctggtgattatggtgatttacctgatcctgatgatgttgatactaaaacggatatacgttatctgaatgtcattcccagtgagatggttattgccgccgcccggagaaatttattatgaaattagtacgtcttgcgattgtccggcagaaatatcgcccggatggtggtgcagaacgttttgtctcccgcgccttagaggctttagggaatgaaaatttggagcttaacgttatcacgcgttcctggcagggagacgttaatcctgattggcatgttcatttaacaaatcctcataaatgggggcgcatcagccgtgaaagaggatttgccaaagctgccaaaacaatatggcaacaagagcaatttgatcttgttcaaagtcatgaacgtattgccggttgtgatatttatcgtgcgggtgacggcgttcatcagcgctggttacagcagcgtgcgcgtgttttatctccttggcggagtaaattactttttacgagtcgttaccatcgttatgtgatggatgctgagcaaaagatgtattcggcaccggaattaaaaatggttatttgtaactcggaaatggtaaaaagggaggtcatgacggattttgggctttctgaggaaaaaatatcggttatttataattcgatagacaataaacaatttttcccggcaacggaatctcagagaacacaattaaggaaagcgcataaccttcccttgcaagctaaatgtttagtttatgttggttcggggtttgagcgaaagggattaaaagccgcaattcaggcggtgagtgcgactgatgcttatttaatagttgtggggcaggataaagaagagaagaaatataagcagttagctaattcactgggatgtaatgagcgcatcaggtttatgggagtccagaaaaggacattgcctttttatcagcttgcagatggcttgttgctaccgaccttatatgatccgtttccaaatgtgatactggaggcaatggcctgcgggcttccggtaataaccagcatgacatgtggaggcgctgaatttattacctctgggaataacgggtttgtatgtgatgctttggctgtttcagatattacggaagctattcagaatacgccttcggatcatttgaataataaaatgtcagaattagcgagaacaggaatactcggttatacaccggaacatttatcacaacagctcattggattatacgaaagggtgctctcatcatgaagggacatgtattatttatcattgatggattacctggagggggggcggaaaatgtcactatccggctttgtgatggtctgcaacagagaggatatgatgttacgctgctctctttggcagagaaatgtgaatattcaataccgagtggtattgaactgatcattgatgttgatggatacagaggaccttttagaagacagactgagatttgccgtagggctaaatctatggataaggttttagaaaaagtttttcttcgcaagggaattcctaccttgattgtctcaaacttgcataaaactgatcgcatcgtcgtgcaatcaaaagtgttagcggggttaaatgtatggttttgtattcatggcgtattttcaaactcatatcttggtaataagacgggattatcccgctggatcaagaaacaaaaaatcaaatggacatataataatcggaatttaatttgtgtatctgatgctgtagggaaagatttaaagaataatttgttacttacgcctaatgaaatggtgacgatttataatcctttcaacatcccagatattaaagaaaaatcgctgcaaaataacccttattcggatgagacttatttattgcatataggtagattccaccgggttaagcggcatgatcgtttattagaagcatttgcgaaagcagatattccgtgtaagttattgattgttggccatggagatgaagctatcactcaacaaataaaacagaagattgtggatttaaacttacagtctaaagttgttttaacgggattccttgaaaatccattaccggttatccgtggagctaaagcggttgttttgagttctgacagtgaaggattagggaatgtgttaattgaatcgttgatttgtgatactcccattgttagcacgatgtgtcccggcggtgttaatgaaattatggttggtgagctagaaaaatataaatcagagctaacaactgattcactggcagaaaaaatgaagtttatctaccatgaaccgccggtgattacagaggatatgtataagaagtttgatttagatattattttggcaaaatatctatccttaatgaagcggtaagaatggtgatatgtgctttttaagtttagttgttgagataagttaatgaataaaaaaagtcccaaaaattaagagaactgaatagaagaaaaatcaaatttccgaaagatctaatatttcatagtgttttttattgataagattagatacgaaatataggatttaatgagatatagaactgctatatatatgataagataattgcactattttatagatctgcgtactataaaagccattattttattctattgtgggcatattctgatgactcgacctgcatttattatcactattgatactgagggtgatgacctgtggcaaaatcacggtcagatctcgacaaaaaatactcattatttaccgagatttcagcatttatgtgaacgttttggttttaagccagtttggttgacgaactatgaaatggcaatggatgatttatacattgaatttgctaaagatgttattgccagaggacagggggaaattggtatgcatttacatgcctggaataacccaccacttgttcctcttaccgacgatgacatgcgttataaaccttatctgattgaatttccaaaagaacaaattagagccaaaattgatctgatgactaagttattggaagacaaactacagattaaaatgttaagccatcgggcaggtcgttgggcatttaatgaatattatgctgaattgctggtggaatatggttatcaagtcgattgttcagtaacaccacgggttaattggcgttttaccaaaggcgatcctaatggcaacggtggaactgattatcgtcactttccatcttatgcctattttatggatttgcagaatattgctaaagaaggtgactctcctttgctggaagttccgatgagtattcaatataaacaccctccattgatgaatttccttaaacaaaaatatgatagtttacgtgggaaaccgcgttctccatctgttaactggttaagaccaaaagggggcaatttggaacaaatgaaaaaagttgtccaacagacattagcagaaggcagtgattatattgaatttatgctgcattcatctgaatttatgcctggtggtagtccgacatttaaaaatgaacaacagattgaattactttatcaggatcttgaagcattatttaactatttacagccacaggttcgaggaatgacattggctgaatattatcaatggaagcgattatcatagttaagaaaataaaattaacatgatcaaggacattaatagagattcacttaattttgggcagataatactgcctaaattaggtgaagtaggcgcttaccagaaacgcctcagatttaataattaatcagccaatattttcttgaagatgagctaatactttcgatggtgtaatacttttgatattcccatccgccgcttttaacgatatttgttctttgccatagccaccaatgagtcctggatctgtcggaccaaacaacgtgatattagggcgatccagtgcggcagtgagatggctcaagccagtatcaacagaaacaacggcttttgctccggccagctcttgggcgacttgtgccaaagtcagctttggtaatacttccacatgagggaaattttccgctaatctcagcgcacgttggtattcatgttctgcgccccaagggagcttaattttcatacctgttggctgaatttcagcaataagttgtcgccaatggctttccggccaatgtttttcatcgcgcgtggtggcatggagaaaaaccagataatcaccctgattttctagtttctgctttaaaaagtgacgggcaatcccataatcaccctgtgctgccagtttggtataacccaagctgacagcaaacagttctcggatgcgctctacagcgtgctgttgcttgctgaccgtatgacggcaatcataaaaaaaactcgctaatggctcacggatacttttgcggtcgtaaccatgtttaggaccataagcgagtcgggttaccagaaatgcgctttttaataacccttgagcatcgatgatggcatcatattgatgtaattttaatttttctttgaataaacgacgttctgcacgaatttctgggctaaaccagtttttacgccagcggcgaatagcaacaggaataatttgatcaaccgcattgtgccaaccggggatttgagcaaaaccttcctctactacccaatcaaaacggacatcaggtaagtttctttctgcatcagtcagtgcagggagcgagtggaggacatcgcccatagaagaagttttgaccaataaaacccgcattaactctggttctccgcttgtaataatttttctagagaagtgataacttgttctggttgaatatcgatcaggctctgatgatagccatgtgaactgtcaccttttctgactttgtgataaccagtaataagacggataacttccgctttatcggataatggtggagtaaaatctgggctacttgggccgtaaagtgcaaccagagggcgattaagtgctgcggcaacatgcatcaaaccggaatcgttggtcacaatagcatcacaggccgcgataatattgactgcctgttcaagagaagtttgtccggcaagattgatacagtgttcacgagcttctcccgtcagtgagttgcggatatcctctccaccttcgtgatctttggcagagccaaatagcagaatttgatatcccttttgagtaataagctgctgagctaatgcggcatagtgataatgcggccagcgttttgccgggccaaattctgcgccggggcagaaaccgatgataggccgatgatcagaaatattgaatgctgcggtggattcagcaatatcttcatcactgacatccagttgaggccaaagtaatggttgaggcagatctgccgcactactgggttttgcatcgtaagccaatgcggcatagcgttgaaccattaatgggaaggcttctttattcaatgtacgaatatcattaagcaatccatatctcatttcaccgcgccagccagtgcgcagaggaatattggcgaagaaaggcaccaaggcagatttaaaagaatttggtagcacataagcgcgatgatatttacgttcacgcagggcgacccccaaacggcggcgttcgcccaatgccagtgcgccatgtcctaatggcatagctaatgcttgattgacctccggcattttatccagcagtgggcggcaccaggcgggggccatcacatcaatttctgcattaggatgcaaagcctttaatgtccggtaaaggctctgcgacatcatcatgtcacccacccacgaagggccgatcaccaatattttcatagtgagtagattacttatcctgattgagccaatgcatatattccgttaccccttcggcaacggttttgaatggcttatcataacccgccgcgcgaagtttggtcagatctgcttgcgtgaagcgctgataacgacctttcagatgttcagggaaatcaatatgttcaacagtgagtgatttatctttatggcattcaacaactgcatctgcaaccgcttggaaagattcagcacgacccgttccacagttataaataccggaaacgccatttttccagaaccaaagattaaccgcagcggcatcaccaacatagataaaatcacgttgaaagccttcactgccggcgaataatttggggttttgtctctgattgatttgattattcaaatgaaaggcaacgctagccatactccctttgtgcccttcacgtggtccatacacattgaaataacggaaaccacaaatttgtgaatcagcttgaggcaagatttcccggacatattggtcgaacagaaacttagagtaaccataaacattgagtggcttctcatattgacgctcttcgataaaattatccgtgcggccgccataggttgctgctgaggaggcgtacaggaaaggagtgcggcgttcaaggcaatagtgcagcaattctttggaatattgatagttattatccatcatatatttgccatcccactcggttgtggatgaacaagcgccttcatggaaaatagcgtcaatatcaccgaagtcatcaccggccagaatactggcaataaactcttccttgtccatgtaatcagcaatatccaagtcagccagattgatgaacttagtaccatcttttagattatctacgaccagaatatctttatatccttcgtcatttagtgctttgacaatattgctaccaataaatccagcaccgccagtgacaataatcatccgactcacctctacaatcgggttaatgaagcaaattgcttctataataacatctaacatccgtgacgacagcagcttaagcaggggaatatactgaaatattatggtaattcagattgcatgacgtgacggatacagcaaagttaatattatctgcctgatagtgtcgtcagtagcttgatcaatgagtaaaatatctcacaacccttcatttataaatcaggagaaaaataaatgtcagcgtcattttatcagcaaattaatgaacaattagaacaagcccattctgaaggattgttcaaaaatgaacgtatcatcacctctgcacaaaatgctgacattgctgtagccgatggcagccacgttattaacttctgcgcaaataactacttaggtttggctaatcaccctgagcttattgccgcggctaaagcaggaatggatagccacggttttggtatggcatctgttcgttttatttgtggaactcaggatactcataaagcgctggagagaaaactggcagaatttttgggtatggaagatgctattctttattcttcttgttttgatgctaatggtggtttatttgaaacgctatttgggccggaagatgccattatctctgatgcgttgaatcatgcttctattattgatggtgtccgtttatgcaaagcgaagcgttatcgctatgctaataatgatatgcaggaactgagagcacaattagagaaagcgaaagcagataatgcacgccatattgtgattgcaaccgatggtgtgttctcgatggatggtgtgattgctgatttgaagtctatctgtgatctggctgatgaatttgatgcaatggtcatggtggatgactcccatgctgttggttttgttggtgctcatggccgtggtactcacgaatattgtgacgtcatggatcgcattgacatcattaccggcacattaggtaaagcgttgggtggtgcttccggtggctataccgcggcacgtaaagaagttgttgagtggctgcgccagcgctcacgcccatatctgttctctaactcactggctccggcgattgtcgcggcatccattaaggtgttggatatgctgaaagagggagatgcattgcgtgatcgtctgtggaagaacgctaacctgttccgtgaaaaaatgacagccgcaggtttcactttggcgggggctgaccatgcgattattccggtcatgttaggtgatgcgaaattggcacaggagtttgccgcagaattactgaaagaaggcatttatgttactggtttcttctatccggtagtccctaaaaatcaggcccgtatccgcacgcaaatgtcagcagcgcatacggaagagcaaattgaacgtgcagttgcagcgttcacgcgaattggtaagcaattaaatgtaattgcataaggcatctctatgaaagcattgtcaaagttaaaagcagaagaaggcatctggatgatcgatgtgcccgagccagagctggggcacaatgatgtgatgatcaaaatccgtaaaacagcgatttgtggtacggatgtgcacatctataactgggatgattggtcacaaaaaaccattcctgtaccgatggttgtcggtcatgaatatgttggtgaagttgttgccattggtcaggaagtaaaaggttttaaaattggtgatcgggtgtctggcgaagggcatattacttgtggttactgccgtaactgtcgtggtggccgtactcacttatgccgtaataccattggcgtaggggtaaaccgcgctggttgttttgcacaatatctggttattcctgcatttaatgcgttcaaaattccagataacatctctgatgaactggctgctatttttgacccatttggcaatgctgttcataccgcgctttcgtttgatctggttggtgaagatgtgctggtttctggtgctggcccaattggtattatggcggcggcagtatgtaaacatgttggcgcgcgtcatgttgtcatcaccgacgttaacgaatatcgccttgagttggcacgtaaaatgggtgtcacccgtgcggtgaacgttagtcaggaaaatctgaccgatgtcatggcggaattgggcatgacggaaggttttgatgttggtttggaaatgtctggtgccccggcggcgtttcgtaccttattaaataccatgaatcacggcggccgtgttgcattgttgggcattcctccatcagatatggcaattgattggaatcaggtgatttttaagggattgtttatcaaaggtatttatggccgtgagatgtttgaaacctggtacaaaatggctacattaatccagtctggtttggatctgacacccattatcacccaccggttctctatcgatgatttccagaaaggctttgacatcatgcgttcagggcagtctggtaaagttattctgaactgggattaatcagtaaagttactactaagattgacaggcgttttcagttttcttgagcgcctgtctaattctatgacactatacccgtcatctttcaagttgcctctttgttggctgcactcgctcaccccggtcacatagttatctatgctcccggggattcactcctttgccgccgcgatgcatcttgaaatccatagggtatatatcctgtgtaaataagtattcactaatctgactttgagtggatggcagattataagcaaattttatttctctttaaccaacctgaagaaattaaaatttaaacgtcattgcggcaaagaccattccaccactaccagcccatcccatacaaagttgatttttttccaatataccttgattaatggcatcgaatattccgaacgggatagatgctgtagcaatattacctacccgttggccaacatgatgtatcttgtcgtcaatacccatcttctgaccaaggcgtgcccacgtttttggtgaacctgtatgaataaaaatatgttcgatatcgtcagatattttgtgatgattaaatagattaatagtctctttctctccatgatcgtgcagtagtgccgagtgggagttcacttgatatttcccgcctgtaggcccaatacgttcaacgtctgtatcattgcagaatagcctccagtctggcagtgaaattgttgataagtcgcttaagtctgggcgattgatataattaaatttgaagttttcaggcgattcattactaataatagtgacggttgctgcctctccgactgtgcaacctatgaatttataagctacttctgacaaggagtttagggaaaaagtctttggaaaaattggtccattttgggacataataaactccatattaacaatagcggcatggcgtatttcaccagctttcattttgctattgataatatccatagctgccacccaaccgttacaggcgtctacaacatcgtagttcctacaagttagccctagtgcctttgagacaaaagtactgttagctggttctatgaagccgcgggcaacactggaatagatcagtaaatcgatatcttccttaatgatattggcttgtgctaaggcatgattaaatgcggcctcaatgagttccataggtttctcgttatctgccaaccaataccgggaatttatacctgctttattaagcatttttccgattagcttcaatgtcttgggcaaatcaccatggaaaatttcttttgaataatattcaactaaatcaataacctcttgattagagacgaatcgggaaggaagtaatccggctatgcctgttattttcataaaatgctctctcaaatgaatataatatttttaaaacctacttagaggtattataaactctgaacttaatttatcatttatgtatattgctcatgaaaatatataatttatttcttgacgacattaatggggtgaaagttaaacatcaccatgggaaaaatttagattaattatttaatgttgaaatattaaatacacttaatgatacattaattacaatatgtgttgatttattctaagtaaaaatattgattgtgaaaagtgtacactattaaattaaccatttatctgggtaaaaatcaattcaaaccaaagtgagatagttaaaattgaatatttttaggtatggtggaaatgtaaaaacatacaactgatcacattcttaattattaatgacatgaagttgtttaaattagttacaattttttttgttacaatgcatccggaagaaataaatagtgtataattcatttcgtgtatttaatcttactatcaatgatgaaatatttatataaccaaatcatctcttaagaatggaactaaaatacctgaagtataaataaaatttatttttctgaataattattaagaaaaaacagatttgaatgctgtcgacacataaataaaaataacgtgtattaacccaccttttaatatgaatttctattctgttttatcctgaggtttatcgccggtcagtttctggatatattggctcaccgtgttcacaatgggattatcaaccagagtatcgccgataactgtcaaataatcttggctggtaactgtagcgggtgcctcttttattcttccaaatgaaaggttaaaaccaccggctttagccggtcagctttagctgcgatactgtgttgtaccggaggtgcaacatggattacagatatggcagccacacggtatttcagattgaataccattttgtgtgggtaacgaaatacagatacaaagtgctgacaggagaagtggcaagtcgagtgcgagaattaatccgtcagacatgcggctcctttgaaatcagaatattaaagggagttgtgagtcaagatcacgtgcatatactcgtcagcagtcccccaacattagcgccaagtgaaatcatgagaaggctgaaggggagaacggccagtaagctgtttgaagaattttcgcatttgaaaaagcggtactggggccaacatttttgggggcgaggctatttttgtgcaacggtggggcagttaacggaggaaatgatcaaaagctatttagaacatcattttgaacccaatccgaatgataatttcaggatggataattgacgcgtcgtttagccgacgcgtatccggactttcagtccgttaatcactaacccaccgactttagtcggtggttgttgagttcacacagcttgccccatttatgtgggttatcaccaacaggtttgccacttaacaacctacttgggctgactaactcaatatcagcgggaagcgttggcagcatctgttgtaatgcacgaatggttgttgaatgaggatgaccgatagcaatagcggaaccattcttacgggcaatggaaatcgcacggtttaactgatgacgagtttccgcttctgattgcacatcatctaggaaaacattacggcggataacgcgaacaggtgtgccttgtgctgcctttgttgcttgagtattgccaatcgtcacgctgtcgagaaaatagaggttataaccagacagtgaacgcatcactttctgcattcccggcaagctcgaagtcatagcgctgcccatatggttattgattcctacagcataaggaactttttgtattgcacgctggatgatgcggtcaatatcttcactgctcatggttggctggagagtatccggttctagcagttgcttacttaaaggtgccattggcaggtggattaagatctcccgcccttgtttataggctttttcagccatctccctgccatgcggtgaatccggcagaatggcgatagagattgcaacaggcatctgcaatattttgttttcattatgaggacggtagccaaaatcatcgataacaatagccaaacgggcagcaccggtttgtaggctcaaaagtaacagggcggtagtaccaatgagttttgcgagtttgcgttgtctcacctgattatctcccaagccacggttgtgggtttactgctcttccctgacggcggatttcaaaatagagtgcgggttgttgctgaccgccactgttaccgaccaatgcaataggttgtccggcacgaacttgctggccgacactgaccagagcactctgattatagccatagagactcatatcacctttaccgtgctcgataacgacaaccagcccatagccttgcaaccagtcagccagtaaaacccgaccatcagatatcgctttgacttccgtaccttctgtggctgaaatcaccatgcctttccagcgtaattcgccttgcagcgcttcaccaaactgatgtatcaccttaccgtggaccggccagattgcctgaccagccggacggccaaggccaccggtacgcgccatcaatgcgcgctcatcctcagttggcttgtagcttgaacctttttgctgtgcttgcttctgttttgcggcaatctgggcacggacgcgggctgcttctctggcttctcgttcagcacgtgctttcgcttcccgttctgccttggcaattttatctcgcagacgggtttcattttgttttagttcagcgagatttttctgatctttctttaaggaagattccagttcagacaacgttttttgccgagcgttgcgggccacttccatctgctgtttctgctgctgctgttcagtcagcacttgtttctgctcttcctgtttctgctgctcaagctttttctgttcagttaaatcaaccgctgtttgttcaagtttaacaatggtgtcctggcgggcttgattaaggtagctatagtaagcgagtatacgttctcctctcttaccctcctctcctctgaacatgagttcgagcccttgatattgcccttgacgaaatgctgcatctaattggcgtgccagcatatctcgttgcgctttttgttgtttttccagttttttaatgttggagactagaaaggtaatctctttattcagcttactgagttgagtttgggcgttgtgtagagattgcccaattttggaaatggtattttcctgatctttcagttgatttagcaaagaactacgtttttgctgttgttgttgcacgctcttctctttctccgcgatgttttgttggagatctttcaactgatttttattgtcgataatttgattcgcaaaggtattaaagctaaaaataaccaataggaaaacatagaacaataaggcaaagatatcattccgccgtgagttctgattgcgccgataattacggctatgcatttccttgtcgtcagccatttctgtaaatataccttgctactatgtgcgttagattatttcatgatgaacaaagagttaccagatgctacgctgattttttacactttcagataatgctgtcttaacatcgaaatcgaatatacccgttatctttcaagttgcctttttgttggctgcactcgctcaccccggtcacatagttatctatacccgtcatctttcaagttgcttctttgttggctgcactcactcaccccggtcacatcgttatctatgctcccggggattcgctcccttgccgccgcgatgcatcttgaaatccatagggtataaatataaacatattagcctacttaccgttgaaattcctgcatgcatccagtgtgacagaacatatgctggtaatgtacttaagatgcttcattttcaggatatttttattttttctcgaaactctccgcaaaatttgcattgagcttatgctatttggctgtaattgacgcaacacaaaggtatactctggaatcttagatatttgttattaaccaacgggagttgttgcccccatgctgcaagaaatcatgcaatttattaaccagcatatgaccttaagcctcatttggattgcgctgctggttgctgttattgtgacgacaacgagaggtttcttctctaaaaccaaagagataactcgtgctcaagctattaatctgatcaataaagaagaagccatcgtcgtggatttacgttcccgtgaagatttccgcaaagggcatattattggtgcagtaaacctgactccctctgaaattaaagacaacaattttgctgagttggaaaaacataaaaagcagcctgtaattgttgtttctgcgaatggcactgaatctcgtactccggcagagaatcttcttcgtgctggttttgaacgcgtatgttccttgaaagaaggtttggttggttggacaggcgaaaatttgccattggcacgtggtaaaaagtaatcattttgggcgtgaatggcgacattcacatgaaaaatttaataaggacatctaaaggtaacaattattatgtcagaacaaagcaatacagaaatggctttccagatccaacgtatctacaccaaagatatctcttttgaagcaccgaacgcaccgcaagtgtttcagcaggaatggcagccggaagtaaaactggatctggataccgcttccagtgagttggctcaaggggtttatgaagttgttctgcgtgtgactgtgaccgcagctttgggagaagagacggcattcctgtgtgaagtacagcaagggggtattttctctattgacggtattgaaggaactcagttagctcactgcttgggggcatattgtccgaatatcctgttcccgtatgctcgtgagtgcatcactagcttggtcagccgtggtaccttcccacagctgaatctggctccagtaaactttgacgccctattcatgaactacctgcaacagcaggcagaacagtctcagggtggtgaacaaactgaacaggaagcttaatgaatagtactgtttctatgacagtgattggtgccggctcatacggcacctcattagccattacgctggctcgtaatggtcataatgttgtactttgggggcataatccagagcatgttggggcattgcaacgggtgcgttgtaatcaaaaatttctgccggatgtttcctttcctgatagtttattgcttgaaacggacctaataaaagcactaacagcgagccgcgatattcttgttgtggtacctagccatgtgtttggtgaagtgttaaagcagataaaaccacatttacggcctgattcacgtatcgtatgggcaactaaaggcttggaagcggataccggtcggttattgcaggatgtggcccgtgagatattaggcaatgaaataccgctagcggtgctctctgggccaacatttgctaaagagttagcggctggtttgcctaccgcgattgctatttccgcgacggaatctgcttttggcgatggacttcaacaattattccactgtggcaaaagtttccgggtttataaaaatcctgattttattggtgttcaactcggtggtgccgtaaaaaacgtgatcgccattggcgcgggaatatctgatggcatgggatttggtgctaatgctcgtaccgcattgattactcgtggattggcggaaatgagtcgccttggtgcagcgcttggtgctgatccttctacctttatgggcatggcgggattgggcgatttggtcttaacttgtactgataaccaatcacgtaaccgtcgttttggcatgatgctggggcagggaatcagtgttgaagaagcgcagtatcagattgggcaggttgttgaaggttatcgcaataccaaagaagtacgtgcattggctaatcgcgccaatgtagaaatgccgattgcagaacaaatctaccagatactctattgcaataaaaatgtgatagaagctgctcaggcattattaggaagagccagaaaggatgagagcgataatgtgcgctcttaaataaaaatctaatgagataggttctaatgtgagagtaaaaaatatgtcgctagaagaattggacgaagtttggaagaacataaaaacagaagcgagagcactggctgaatgtgaaccgatgttggccagtttttttcatgcaacattactcaagcatgaaaatcttggtagtgctttaagttatatgctggcgaataagctggctacgccgattatgccggctattgctgttagagagatcgtagaagaggcttatggctcggatcaaaaaatgattgtctctgctgcccgcgacatcatagcggtacgtctacgcgatcccgccgtagataaatactcaacacctctgctgtacctcaaagggtttcatgctctccaagcctatcgtattgcccattggatctggggagaagaccgtaaagcattggctatttatctgcaaaaccaaatctcgatgtcttttggcgttgatattcacccggcagcaaagattggttgtggcattatgcttgaccacgccactggcattgtgattggcgaaacggcggtagtggaaaatgacgtttctatcctgcaatccgtcacccttggtggtacgggtaaaaccgggggtgatcgtcatccgaaagtcagggaaggggtgatgattggtgcaggttcgaaaatattgggtaatattgaaattggtcgtggggctaaaattggcgcaggttcagttgtccttcgctctgttccaccgcacacaacagccgctggagtgcctgcccgtattgtcggtaaacctgaaagcgaaaagccatcattggatatgaaccagcattttaatggtatcaaccatggctttgagtatggggatgggatttaatttatcgaaatctggataattagtgaacgctatcatattttcacatgctgaatgtggaaatatgatctggcatgcttaacgtgtgaaatcttctataccctatggatttcaagatgcatcgcggcggcaagggagcgaatccccgggagcatagataactatgtgactggggtgagtgagtgcagccaacaaggaggcaacttgaaagatgacgggtatataaattatttttttgctacacctattataatatagtgccaatgcttaggaatgactttatttagaactttattatctaacacccctaaaaattttctttgaaattcattcctaccaagcgtagcaaggaagcctaatgttgtataattaacatctgaaaatgctgataaatactctgtcatttccttggtggtaacatagccccaagtatttccccaattaacataatttttcctgaggaatttatgcaatggtgatgcaaccagattttctgcaaaccaaagttcacctccttcctttaatgaataaaagatttgattaatagcctctttttgtgctgttttattgaaattataaccgacagcacctaatactgatttaaacataacaatatcaaaatggttcttatatttaatatccgatgcgtttaatttatcatactgaatgctcttttctatattataacgcttatgtttctccagtgcttttggcgtagggccatctaaatcagtacataagacatttgctccattcaatgctgcccataatgataacccaccatttcgactacctagctctagaatattagctgactttaattctaatccagaatgatcttgccaatattttaacgaatgactccaattatatatatcccattctatgacatcatggagaaattcttttgaattttttgctttcatagtgtaaccaatatatatcaatgaaaatgagttattttaatactaactttattaaattattatgatctaaatagttttatcaaatagtagatcatttgagggaatcaaccccgatataagttatatgaatcaattttcaaagagaaaaaattccccaatagggttaggttatactaatcatagcacctacgtcctgtaatgaatgatgatttagcgcaaaacttattcagaaaatccaggaaaaaactatgcccttgatgtcttactgttttcctaacgacacatcatggacattcggtcacttacattgccaaaacctgttgcttttgcccatctttggtcgaatgcgatatgggagtacagagctgataaccatcgtggccgtaccatgcttcatccgagaacatgacaaaatggttatctgattctcatcgtgggtctggtgcagagcggttcctaaactgcattgctgtgacccacgcaaagaagaaaaaattaccgtgatatggtcaataacacattgaaccattgcaggaatgtgtagcgatattaggcattattggcacactattctctgatgatagcgccctgataatctagttgccgccaggcttcaaaaacaacaacagccactgaattggaaagattcatactgcgactgtttgctagcattgggatacgaattttttgttgtggtggcatattatccaatacataaggtggtaaccctctggtttccggcccaaacatcaaataatcgcctgcttgataacttacagcactatgtgccggagttccttttgttgtgagagcaaacaaacgagcagaagatgctcctgttaatccttcattctctaaaaaagcaaaataatcatgatgttgcttaatattggcaaactcatggtaatccagcccggctcgacgtagccttttgtcatcccaggtaaaacctaggggctgaatcagatgcaattgaaatccggtattagcacaaaggcgaataatattaccggtattcggtgggatttcaggttcaaataagacgatgtttagcataaagccccccagaaacaaggggcacagattagcagaaatcaggaggggatgcagggggatcttcatcgatattcttatttatctattagaagatctttccttgttggggggactcgcttgtattgtcagtaaacttaaaaatgaaaaaacatcactggatataacctaacagactaaattttttagagactctctggattacttttttgccacaccgatgataatatagtgccaatgtttaggaacgaccttatttagaactttattatctaacattcctaaaaattttctttgagattcattcctgccaaacgtagcaaggaaacctaaagttgtataattaatatttgaaaatgcagacagatactcgaccatttcattgacggtaacatagccccaggcatttccccaattaacataattttttctgagaaactgatgcaatggcgatgcaaccaaattttctgcaaaccaaaactccccccctttttttaatgaatgaaaaatctgattaattgcctttttttgtgcagatttatttgaattataaccgataccgcctaatactgatttaaacataacgatatcaaaatggttcttatatttaatgtctaatgcacttaatttaccatatcgaatactgctttctatattatagcgcttatgtttctcctgagcctttgaagtagggccatttagatccgtacataaaacattacctccatttaatgctgcccacagtgataatccaccatttcggcttcctagttctagaatattagctgactttaattctagattagaatggtcctgccaatattttaacgcatgactccaattacctatatcccactctattacatcattgagtagctctcttgagttctctgttttcataaaaaaggaccaatagactaattattttaataatacttttatagtgaattattatggtctagtgatagattattttttaatgatggtattttaggaaaagattacgggagggcttgcttagcaagaatttcagatagataggctgtactcatcgttgctttcgtgtctatcttatcttaaatatttttgtattattcagtatattcactgcaatatgttttatccgagatagtaattccgctgaattgttgcgccgaattgggagcgcctgacggtttttccatctgtggcactccctgagcttttcatcagttcacggcaaatattcatccatttaatgaaatacttttgaaacagcttggtgctgatacagctaaccatatggactatggtgtcatgggttgtaataccctgttcaaatttaccgtattgctttaacaatcctcgactgctcaacaccaaaaccttcaatttcttcccagcctttggtgccacaataacgtcacaattgttaacggcagaatatctgccagctcatagttatttgctattctgactaggattgtgagtaatcgagtagttgctaagtcaatcgtaaaaaggcttttagcgttatttccctgagcgaaaaccatgagggttattcttttgccaattccaactatcacgcatcatatcgtcaatattgcgtgttgcttgccaaccaaggatattccgagctctggatggatcagaccaacactcagcaatatccccaggacgtctatctgtaattttatatggaatatctttacctgacgccttttcaaaagcatgaagtagttcgagtacagaataaccagcacctgttcctaaattaaaaacttcataggattgttgtttatccagatagtcaattgcagcaatatggccttcagccaaatccatcacatgaatatagtcacgaataccggtgccgtctttggttggataatcattgccatacactgataaacattccagacgaccaatagcaacctgagtgatataaggtaacaggttattgggaataccattaggatcttcgccaatcatacctgatgagtgtgcaccaacaggattgaaatatctcaggctggtgattttgaaacttggctcggcagcggcaaaatcttttagaatttgctcaaccatcagtttagaagtgccataagggttagttgtaccaccaactttagcattttcagtaagtggtacaaattcaggatcaccataaaccgttgcggatgaactgaaaatcagttgatgtacactgttggcacgcatagcctgcaacagaactagggtgccagtaacattgttctgataatattcaagtggttttctagtggattcgccgactgcttttaatccggcaaaatgaataacggtttcaattttattttcctggaaaattttatgcaataaatccaaattgaggatatcaccttgataaaacttcactgatttaccagtaagtttctcaactctacgaagagattctggtgatgaattgcaaaggttatcaataacaacaacatcagctcctcgttccagaagcgttaatactgtgtgtgaaccgatgtagccggctccgccggtgattaggattggcatttaaatattcttgtgcactttattagttatttgtaagttcatgataatctaacctatccaatatagtctcttatcatcccaagtaaaatttagcgttaaaacagatatagccgaaatctagtattatcacaaaggagaataatattactggtgttagggaggatttcaggttcaaataagactgtgcttagcatagtatattatataccaacttttaatctttcgtcttcagtcaagtattcaacaagacatttataatgcatgtcttttgttaatatatttgcacctttttctatcaatagctttattattctagtatccccattttttaaagcatattcttttgcatacattagaactgaagttcctttatagttagtagcattaacattagcgccagaatctatcagatattttactatgcctaaataaccatgataagaggctaccatcaacaatgaccaagtatgctggttacgttcatcaattccagatatgtttttaatatatttctttatttcagaaagattgttttttttacaaaaatcaaataataaatcaatcttatccttatatagtattatattataatcaatagttgagaattcagaaaaattttcattatctttaatgagagctcctggtctaccagaagaacgtattgatgttatttcataattgcagtaattagtattttgatagtgaggtaattgatattctctaaaagagaatgctcttatatatctacctatttcccatgctgttttatgtaaattaatgctttctgatgaaaaagaaattgtatttttagaatagtaagatgaatgctttgatttttgagggttgctaaaaatattattattttttattattttttctatataatcttcaattaaagtgcaggaatgagaaatatagtttaaataaatatcctttgatgtatacctttcatctatattaatagttgtttggtcaattatttcacctgtatctattccattgtctatataatgtaaactaacgccagtagaaatctcattattcaatattggccatatggatgtatacatccctttgtattttggcagtagagaaaaatgaatattaaatatcttcttagttctgaatcttccaattttaataagttgatcaaattctagagataagaagatagaagcatttctttctgcttcttctagtgaaataataggtacattgatttcatttgctctttttttaagagaatattgccaggtattattgcctgagtctgtcttattaattacaactgctaagttttttatattatatttaatttttaataaatttagaacatgaactgcaatgttatttttcccagcaataacaatcacttgtgctacctataaattaagtgtgaaataattaagtttagattaaataagttcgtatccctttaaatagtttatttggagttttgccaccactagtctttcgggagtgattatttgatctgtttatgataaatcttatctctcgttcagagattttattaaagtttatcccttttggaaaatattgtctgaattagcttatttatattttcatttatttctctttctcccgaggagtataaagattggaaaagtaaatcgttgtatctaactattcactaatcattttatgactcccaaattctaaaccgttatcaaacatcattgttttaaccctttgctttaaatggctataaagctttcacggtggcttccgttacttttgatgcttgttttttattcagtttgaaaatgattatatagagcgttttacgttcaatcagcgttaataatacacttttttatcttttctaattattgtatcaccttcccagtcaccaatccgagcttgtttatcaacgacttctgggggttcattaatactgactttttttaatttttcctcttctttcataacggccgtatcgtttacgatacgatttaatggtaattctgagatgctgccataagtcacctccatccattttgtctttataagtcaatctataaatggtctcatgatataaggatgtccctttatactttctgaaatagtcaaccgcctgttcagaattgaaatcttgcaagattagccgctttatccatttttttatttctttgatcatttttgtggatttcttggtagaatgacggcgagaaagcccctgaagatgggcttgctccgggcaatattcttttatttcttgatttcttttcaactccctgctaatggttgataggcttcgattgagtgattgagcagtgaaacgtcgtgaaaaaccgtttttttaactggaaatctggtatcttcctgctttgaccagttttttataggccatagtgtattatatgaacgcatcctgtttgcaagggcatccgtgattctgacttcgacggtaggttgcagctttatatccggctttattgctgcttgatagctagcgagcctctatgtcattcgctgactcacatctcattttcctgcgggctttaagcccatagcactattcatgtttagtaagtcacggtcttacctgtctttgtcatcgctatggccgccagagcaacctttcctcattcactctgattcttaagcgtgaatgtttgtcagttgtagccgctaatacggcctgacactgacgtaatttttgtcatatctgctgtgatgagctgtcattgcccagactgttcgggctaatttgtttgccaccagtgaggctgctcttgccccgtggataaacagcgttcgcaggtaggtgtatttatcccgagtaggtgaatttcatcgccagacccagtttatttcgagactaggccgataaaagcagcgaactcacggccggatttaaacgctgacgcttcgtccatcgtagcgacggcagcggtggcaatgagggggttaatcccggggattgccagtaatcgctgacaggttttattctgcttcgccacagccgacagttgtttttcaatatcatcgtcaatatgagcatccagatcagcaagacgctggtactgctcatcaagcaggcttatcaggtacgtaggtaaccatgttcccaaacgttccagagtgtctgggagttccttagctagagcggctctgcccttatggagagtttcgccaaattcaggcaacatgctgtgtagtgcatttatctgtgcggttctgaacttcaccagttgctggcgcatccgatgaagcgtcagtatggattgctgttcttctgttttgacggcaacggattttacgggttgctgaactgacatctagatagcccgggcatccatcacatcattcttgttgcccatcacaaatgtcttaacgaattttcccttgagcaatctgacttgatgtcccagcttctgaagctcacgcgctcagtgctgagcacctccgcacgcttccagccgataagacagggtttccgatgacctgaaatagatcaggaatgcctcccgtctaatttgcttgtcaacaatttcaccggtgttctcatcaatgaagtgcgcctgtataagatgttttgcaatatcgatgcctacaggagtatattccatcttgtggtttccctagtcagcagggagctttatgcaccccgtattgctgccttactcaattaatttagatatcgtaaacaaattgtttgaaaggattgcattctcagtcggctcagatgttggatgtccagtttttactaaaaaacatcgaggaattccggcacgttctccagcatgtatatcagagtttttatcacctactaatatagagcttttgatatcgatggaatatttttttctagcttgctctatcataccaggtgaaggttttctacaataacaatcctttgataactctgggacaataccatcagggtaatgaggacaatggaatatatctaaaatatcaactcctttttcttttaaatcatttctataccaatcagttaataattgatattgtttctcagaataatagccgcgagcaattccagcctgattagtaatgatgataatttcatatcctaaatcacgaattttttttagcccaactatacatttagaagtatattcaaaatcttcaatcttatgcagatagttgacctccttattaataactccatctctatctaaaaaagcaacttttattttattgtgttgcatgctttataataatcctctggaattcctatatcaataaagtaaccattagacacaaatgccttaaaaataccgttaaagtttttgatgaaatcattttcgaaagaaaatttttctaaaggaaaatttcttattaaatcttttttaattaaatagataccactatttataatacctttaccagttagtcctttttctagcatagctaaaacattattgtattcatctaatttcaaagttccataacgtgaaacatcgtctatatatacaccacttataactaaatctgcatcattcgaaaaattaattattgaattataattaatttctgacatggtatcgccattcaaaactaaaaatttggatgaatttatttttgagctagcaagcttaattgctcctccagtacctaaaggagtttcttctatgacgaaatcaacttcacatgatactggttggtctttttgtatgcatccaataatgtaatcagcttgatagcagagagaaagaactatttttgaacaaccttgctcttcaagccttttcattaagcgataaaggaaaggtttaccatttatatctaccataggcttaggtaaatcaccagttacggcttttaatcgagccccttgcccaccggctaaaattatcgcctcaaacataatttataatttctctttaggaaaaatttttgcttctacaatggcgcaaatcatatgaccaatacaaatatggcattcttgaatatatggtgttacagaatcaggtacgcaaattgctatatctgccaaatcttttagttttccgcctgagccacataagactacagaagtaacaccttcttcttttgcaacttcaatagcttttattatattcagagagttgcccgaagtactaatgccaataaaaatatcacctagtctgctttgagcctgtagttggcgggcaaacagtttatcaaatccataatcgttgccgatagcagttaacatggatgagtcggtagtcattgcaattgcaggtaatcctggtcgatcataaaagaagcgactcacaaattctgcggcaatatgctgagagtcggcagcactaccaccatttcctgcgagtaaaactttattattttttgtgtaagcatcaactattagattagcaacatcagaaatggcttttaaggttactatatcatcagctaacttttgttttactttaatcgaatttaataggtaagtattaatgtaatctaaattgtccatgagtaggctccttcattagtaaattggaatttatgcacatgtccgtcaaattgctccaatgctttaatgacatcgagtttattttcgggctcaacaaatatcatcataaatccaccaccgcccgcgccagagatcttcattgagatggctcctgcattaagaattgaggattcaacagcatcgattaaagcattagaaattgatggggatgtcgctttctttgactcccacgcattgcgaaactcctgcgctacaccaaggatatctgctttaaaaagtagttctttaattttgtatgcagattctttcactttgtgcattgcatctaatcgagctccgttatctttcttaatagatttgatctggtcgtcgattatctttgcagaatctcttgaagtgccagtaaaaaacaaaattaatgaagattctagctcactaataatatagcgacgcattctcagagggtttacgataacgcgatcatttgcataaaattctataaagttaaagccaccaaaagtagctgcatactggtcttgcttaccaccagatagtttacagtctcgtctttctatttcgtatgcaagttgagcgatatcatattcccccagtggtagggaaagcagttgacggaatccttcaagcatagcaactaccatggtggatgaagaacccaagccactgcctggaggtgcatccgactgtgtagtcagtcttagaggtatatacttgcccttgttatattgttccataatgcgcttatatacagctcgatgaagtaccaaatttccatctaaagagacgtcattatctaactcaatgatatctattattccaagatctttcgcttcaaaaataacttggttgcctttgatatcatcatctataaacgcatgtgcatacatgttgattgtggcattcagtacacagccgccaaactcatcactatatggtgaaacatccgtacctcccccggcaatacctaaccttagcggcgctctacttctaattttcacgataaacctttttaaattttttgaaaagtatttattatcgatttagcaggattcgctctttagcaatttcatcacgccaatgatatgataatttttcttaaaagcgagatgatttacacatgaatatcccgcgattccaataataataaccagtagattcacataaaataagtgcaatatcgttaatctggaggtaaacatgttcgtattccctcaaataatttattcggtgttttccctccttaagttttttgggggcgataatttaatcagtttgccacaaagtttatttcctgatcagagactttattaaaatcggtttcctttggaaagtattgtctaattaacacattaatattctcattgatccctttttcccaaggtgagtaagggtgagcaaggtaaatttgtgtttctaatttttttcactgatgatttcatggtcttcgaactccaaaccgttatcgaatgcgatggtcttactccctgattttaacgggtataatactttcactaccatttttactacttctgatgctcacttgctatcaagtttaacgataattgtatacagcgttttgcagtcaatgagtgttaataatacatttttttatcttttcttattatcgtattctctttccggtcactaatatgttattttttatcaacgaattcagggcgttcatcaatattgacccggtctttaattttgcctcttctttcatagcgactatagcgtttgcgatagggttttctggtaattctgagatgttgccataaatcatcccttctctctgttctttttctaataaaaaattagtcaggtatgaaccatcctgaccagtaatacctgtaattaacgctttcatgataaccttattttgaatatagataggatatatagttttgagttacgcttttttgacggaattcatttgctatggtaaaagaactagatgccatcttcattttttctttttcatccattagaaaagccttgagtaatgctgtagataaaccatcaatctgtaatgtgaattttattgaattttcctttctacataatacatttaatccaataatatcgctacctagcaatatgcaggaagctgcggcaccttctaataaagcatatcctaaaccttcatgatagctaggtaaaacagcaaagtcagagcatttatataattcgtgtatatctagcaccgaatcataaattttaaaactatcaggaatatagcctaaaactgtttttacatctttagatgtacagccaacgattaagagaaggggctttgtatttgtgtgtgaaaaagttttttcaaagctttttaatagaagattaaatccttttcgtttatgagggcgaccaacataaataaaaaccttcatatttttgtctatgccatgtttctctttaaggtcatctatatatgacaaggataatttattgtcataaaattcattaggtagtccagaaatagaacctgaaccaatcaccgatacatttttatatgttaggcagcttaaatagggaaccagttctttatttactgtcaagatatccgtggcaaaaaaacagtttattttttcaatggattttaatgcatattttaataaaccagaatatcctatgtaagggacaccatgattataataaacacgtcttttaattccaaatataaaagatgctaataatggtagaaatgcacctttagtcatatggcatatgataatatccgtatggtttttcttaaaaaaacaaatcaatctaattaaattaacaatcaataggaatggatttaaggaaaaacaaaatttagatttaatatatttacagcgcaaagcatccaagaatttggaagagccatttaacggatcaactaaaagtgagctttttaatccatattcaatttcagataaaattaatggctcaataaatctttttgcagtaaatgtatttacaacagtatgtataacattcattaagataaatcacttttttggtagaataaaaactttcaatgagctaatcatgaaccccagtaaccagataagccttggtcttaaaagaaactcccgtaaacaatatgaagcactttctgcatatggtaatctagagcctcttgattgattaacagatattctatatttcaatgtgacaatatccacattgcataggtgatatttcttattccgtaatagtcttatccagagatcataatcttcagattgaaatcctcctaagtatcctttttctttaattaaagtagctcttttaattgctactgtagggtgaacaaaaatatttttaaatggaattgtttggataaattttttcattggtggtgtgtatttatttaaaacggtagagttttcatcaataaataaaactgaagttcctataacatccggtttattatttttatctatttgtaaatttaaattttctaacctatcagataatgatatatcgtcagcgtccattctaactatatattcaccagtagatatatttaaaccataatttaaattaaaagaaagctgtcctatatttgttctataacatttaattctatcatcattatagtcttgcaaactattccaaagtttatcagtacaattattagctacgaatataaattcannagtgtgatatgtctgattcagaatactattaattgcttca

SEQ ID NO: 28 - DNA, 73195 bp, Photorhabdus luminescens
  misc_feature (64223)..(64223): n is a, c, g, or t
  misc_feature (64239)..(64239): n is a, c, g, or t
tcactgataatggcttatatatctctttttcagaatctgaatccactgccgcacatgcaaataaaaacgccgccgccaatctttggggaatagatagcgctaagcagtgggttgaattttggattgaaagcgaacgtcaataaagacgaattagaggattaaaaatgaaatcaaagatgaaatttgcaactgagtgtaaagctgaacaatctcgctatttatcagaagctaaaatttatcgtcgcggctctgaaatgcgaaagatgtatgtttctctcgcgtggagaaatagaaataacgcgcggcaatggattaatttttaactaatgggcagggatgctaattattaacggaaaaattaatgagtaaattaaacagtgaagaaaaaatctggcttaataaattgcaaaaaattttagatgaatgtccgtcggaaagacttggattttatacaattggagataatgacttatctgtttatgatttaacaaagactaaagagataaatgaacttcatcataaaactaatcgtgactacccggcctgtattgaagaatccggggctgaatttaactattatttgacttttccggcaaaagtagagggtgtcgctgggtaattaaaataacacttaatgaggattaaacaatgtcagaaaataaaaaacacgtgcacgctgagttaatgttgcagtatgcacaagatgctttgagaacagataagccttgggagttgtgggaagcgtattggccttatagtactggtggaaagtggataggttttactaacaatccgggatggtatgaaaacgtaaaatatcgccgcaagccagaagttattacagtcggtaacgttagttttccgaagcctgttgattatgaattagattatggagttggttatttttatcctaacctacactcaagaggtggagatagacattgtgaacatttctggagtggcaatgagatagattgttcactgttaaaaataggttttattcatcttacaaaagaagctgctcagcagcattgtgatgcactaattaaaataagcaagggtgagttctaatatatatggagcagtgaagccagcggagggcacggagatatatcatggagataacagaggtaatgaaatatgtcagataaaaatgaactggttgttattgatataaaaccagagcaagcgccggctctttatatctcaaatgggcttgacggatttttaaataaaattcgagaatcagtaaatgaagttccagacacaacaacaaaaaaaggccgtgacagaatcgcatcattagctgcacaggtttcacgtagcaaaacagcaatagaaaaaccgggtcgcgaatatcttaagcgactcaaagaagccgtgagaccggcagagcaagaaattaagcgctttgttgatgcatgcaatgagctacgcgatgaagttcgcaagccattaactgactgggaagctgagcaggagcacattaagcgcgaagagaaggcacgtaaggcagcggcggaactggcaaaacaagttgaagtcgatcatgaaattgctctgttaatgaatgaaaaatttgatagagattttgcagagaaaaaagccgaactggaacgccagcgtgttgcttacgaggaagaaattaagcaacaggcagcggagcaggctcgtatcgatgccgagcgcaaagcttcggctgaaatcgaagccgcagagcaacgtgaagccgaagcaaaagcagcggcagagcgtgcagaacgtgaaaaactggaggcgctaaaacgcgctgagcttgaaaaacaagctgcaattgaagcagaacgtcgtaaagcagcaacagatgagcacgctcgtttggctgaaattcagcatcagaaagatgaggaaaagcggcgtcgggctgacattgatcatcgtaaacgtattaataatgagtctctgcaagagttaatcaaaactggaatatcggaagaatgtgcaatgaattgcattaaagctatagcgtccggcaaaacatctcacttaaaaatcatctattaattatgaaaataaacaaacatatttttagcttagctcagtctaaagctagaattgcacgtaatatagatagccaaataatatggaatattgcaatgcaatatctaaggttagcatatgaagatagttaaagagtggctcttcgctatgttatttcccgcctgtttagttctgttcacaacgttaattttaattttcctgaggtaattatgtttaagatttattgtgattcttttaaagtgaatcttattaataacagaaatgaaatcgagataaatggaagtgttattatacaagggagctcagaagaagtactcaattcaacaaactcttgctttaatgaaataaaggaatattttgagcaaaagggttataaaatcgaggctttgtgaaatgaacccatatgcagtttatgatgagattgaagaaaagaggttggaagatgagcactacagggaaattatattagagcaacaaggcatggatgccgaaattatttataacaagcttcctgagcttgctggaattttttcaatcgaaactaacaaactctttggcgaattactcacggagaacgatgaagccgcagagctcgttaattctcttttgtatgaactaagcttaatgaaagtaaaaatggaggatatatgagcacagcagtacaaaaagtttatgaaatcatcaacccgctcaagactgaatttgagcaaatttgtagtgagccgggcatagtatttaaacgtgagtctgaatttgctatgcagatattcgcaaataatgattttttagccacaactgcattaaataatccggtttcagcgcgtagcgcagtaatgaacattgcagcaattggcattagtctaaaccctgcgcaaaagctggcttatctagtgccacgaaacaaaagcgtgtgtcttgatatcagttacatgggtttgatgcacatcgctcaacaatcgggtgctattaagtggtgtcaatccgctgttgttcgaaaaaatgacatattcaagcgcacatctattgatactgcgccaattcacgaatacaacgaattcgacacagcgcaatcgaggggggacattgtcggcgcgtatacagtaatcaaaacggatgactgtgattacattactcacacaatgagagcatcagctatatttgatatcagagatagatcatcggcatggatagcatataaaacaaaagggaaatcgtgtccgtgggtcacggacgaggaacaaatgattttaaaaaccgtagtcaagcaggcggctaagtattggcctcgcagggagcgattagataaagccattgactatgtaaacacagaggcgggtgaaggaattgattttagcaaaggtcaaaactcttacattgacgtaactcccgcagcagatagcacaatcgaaagtataacaaacttacttacaacaatgaataaaacttgggacgatgatttacttccactttgttcaaagatattcagacgacaaatattatcacccgccgaattaacagagtcggaggcaattaaagcatctgattttttaaggaaaaaggcatcataaatgatcagcaatgaactcattctcagcaaaacaggggttgatttgctcacagtcgaacagggaagtcatgattggcagcggttaagattgggagtaataacggcatcggaagccggaaaagtgatatcaaaaccgcgtagtggtacaaaatggacagacatgaagctgacatatttctatacacttctgggcgaagtgtgcacaggtagtacgccggaagtaaatgcaaaaacattagcgtggggaaaaaattacgaagaatcagcaagagcaacttttgaatttgtagctgatgtaaatgtaacggaaacttcaattctatttaaagatgaatcgctcagaaccgcatgctcaccagatggtatttgtagtgacggacttgggcttgaacttaaatgtccttttactactgctgtatttatgaaattccgcttgggtggttttgatgctattaaatctgaatatatggctcaagttcaatattcgatgtgggtcacaggtaaaaatgaatggtactttgctaattatgacccgcgtatgactcgtgaagggattcattacgttgttgttgagcgtgacaacgaatatatgagtcagtttaatgatatggttcccgatttcatagaaaaaatggacgaatcattaaatgaaatcggcttcaaatttggcgatcaatggaaatgaaacacaatcatgatgatatccaagttgggagggtttattgtccatattccacatttcacagcggctggttaactccaggagggaaaataaccaagaatccatttacagcatataatgccgctgaggagaaaaataattatcttaagtctcttgaagatgagttaaataaaaataaggatgattatatgtacggtgagaaatttaacggcgatccgtgcccacaggggcacacgctaagatatgtatccaatggtagctgtactgaatgccaaaaacataaagataaaaagagaaaaaaggaaaaaagagagagtaaaaataaagtctatctcgacgattttactcatagcgtatttattatcgggaatcccgaaagatgtaaaaatcaatcagtttaagtgaggtgatttatggctgtgaagttagaaatttttatctcgtttaatgaagacttaaataagcatcatgttgaatattccactgcatttacttcatgtagtacgcatgaagagcgacagattcttgcggagttgagaactaaattattgtctgagatggataatcaatatgtaggaaattatattaattaaacagaggggttttatatgaaaagaacgccctggaatccagatacgcgagccattcagcgggttaaagacccgctaccaattcccgtgagatgtcattattgcttcggccacgtaacaatagcccatcatgaaaaagtattcggcaaaatccacagtaaatggccgtggctatatatttgcactgagtgtaaagcatatgtcggtctacacccatacactgatattccactcggcacactggcagattacccgacacggatagctcggatgagtggcaaacgagagtttgaagaaatgcgagagaaatggaatttagaacgcacggatgcatatcaattgctagcacggaagctaggaattaactttaggaaatgtcacttcggctggttcgatattgacacttgttatagagctaaagaaatttgcgaaaatatgattattaaaaagaggtaattatcatgactaaaaatacagaaactttaatatctgcatgtcacgaattagcaagagtagcaagctgtgacgattatttaattctgaatgagattgctgacaaattgaaatttcttcgtaaagaacgtgatagctataaagaaatgttttatgactcttgtaagggtcttgctgcgatagctaatgctgcgggtattaaagcggaagatgattcaggttcgcccggccaagtaatagagaaaattgagtcaatgcttaatattgactggaatttttcaaatcaaccaaaaattaatattggagaagagaaaaaatattgggcttatgttaaaaaaagtgttaaaaaagattattatctttttaacgaagaaacaaataaatgcgaacttgtttgtgaccctgttaaacatcatttttatgttactactttaatttatgttaataaaccaactccaacaggaaaacatgaatatcagtggaatgacgatttgcctgactgggcgatatcagacgatgaatatgactggataaattttgtaggttgggctatacaatattcgcatcctgattattgcaattggattgattcattggagaaaaacgaagaggttattgcttgggcagaatttattcatccatccgcgccggagataagtcaatgataattagtcccggagatgttgttaaatgttataatgatatcaatactacagaatataaattcagtgcaggaaaaaattatgaaatagtggacttctatggttgtctcggtcttgaagatgacgaggggttatttattcctattaatgaattagatattgaatatgaaagcgatgaatgactatctatgccatcacttctatttcatctggaaacgaatgttcaagcgatacatgataaatactctcgtgtaccgcggagctagtttaccagaagcaaaagaagccgcagcatgtgagattgaatcatattctagaaaagatgaatattggaaatacattcatcctcacgatgccgctaaagaatcattatcttattggagtgattaattatggaaataagattagataaatatgtcatcacatcagatgagcatcagttcattcttaatgagattaaaataaacaagggaggtaaaaacatcggtaaagagaggttgcaaacaatcggctattatccacgactggagcaattaattaagaaattaattttattagaaattcgtcgcgatgatattaaatcactgcaagatataagtgatagaataaatcaagttgcaacagaaatttcattgaaaataaagtagttcaatcttaaatcactatgtgagatttagtttgatgaaatatgaacttatttatgccgaccctccgtggcagtataataatgcatcttcacgcggtgcagcgaataatcactataagacaacatctttcttcgatttaactaaactccccatccattctatagccgccgacaactcagttcttgcaatgtggtatacgggtaattttgcaatggaagcaattaaactggccgaggcgtggggctttaaagttaaaacaatgaagctcttcacgtgggtgaaattaaataaattgactggtgatcggatagataaaaacggagttcaagatttctttgatttcatggagatattaaacaaagaaacggtgatcgggatgggtaactacacgcgagcaaatacagaggatgcattgctcgcagttcgcggaaatggaattgaacggattagtgcggcagtgaagcaagtggttttctcttgtgtcggagagcattcagaaaagccgtgggaggtcagaaacagacttgaacaactatatggaaatgtcccacgcatcgaattatttgcaagaagaaaaattcacggatggcatgcatggggaaatgagtccccaattaataatattgaatttatacaggaaataaaatcacatgaaattaattagcttaataaagccgatcaaagttaactacttcggcatcgaattatcagttccattctggactaaatttatagcaacagaaagcaaaggaattgtattggcatggaacaaaaggccatctcaaattaacgacaactggttctctgaattaccatcatctcaatatgaaattgtagctcttgttactttagatggaactgactggaaagaaactctcgttgaaatatgagtgtaattagaggaggcttgattatgttaacttactcaatgaaagattttaaatacacgcttgatgattggtattttgataattcacccagaatgacaatagcttgtttaaattgtgggttattctttattaaaatatcagcaattaaaagtaataattcactgataaataattggttttcaatatgcataactgatcaggatggattcaatgaaattgaatttgacattacagaagctaacattgaaagagtacagaaaatcattgatgtcgccgaaaaatgtaggctattaaataatgagttaactgatttaatatgtgattaaaaatgaaaataattgatttgaaatttaatccagatgaatgaccaaatatacgaaaacggacgtcgcaaaatagcaagggaatgcttacgcgagctaacagctcttaacaaatacgacgataaatcagtcacagcaatactcgataaatatacacccaagtttaaattaattatgtctgagcatcagatgaagttcagcgctaaatcagtgctgtcttattatgtgagaaatataaggaaagaaatatgaaaatgagaatagatttaggtaaatatgttattacacatagtgcaggccaattcgatttaaatataaagcggacattaaaaacaggtgaaaatgaggagcaagagcaattaatatcaattgcatacttttatacactctatgagttagttaataaaataataatacttgatttaaatcatgatgacatagaaacattacagcagttaagtaacaaaattgagaatatatcaagagatatagcaagaaaattaagggaaattagacactacgaaattaacaagcccgctgattaaggtcgaattatgattaacaatgctaaattaatgaaagctagcgcatggggaaaacgtgagtttgaagaaaactcggttccagacaacagaaccatcaaacattggatagagataggtaaattaaagggaaaaattattgatggctcagtgtgggttaattcatcagaaaggtggggggttgagtcttctatttcttcttgtgttagtcaattaatcagggattcataaaatggcatcaagaccaagaaaaaaggaatttaggcacttacctgattttctttattacgataaatctgttaatgagtacagattgaccctcgttaatggaaaaaggaagtgcgttggtagcgacaaggctgtcgctattgccatagcgagagaatataacaatataatgaggccggagtcatctgtatctgtcagttcgctagttaaagaatcaggtggaaaatacggagaatcccttccgtttcatcatcatattgataaccttttttcccgtattattaaagatgaaaatccgtctgacaacactcttgcggattggcgaaatgatatagaacgaatgaagacgttttttactgatacactagcatgtgatatatcacttgaacacgttaataattatatcaaacattatcataacgatgcgtcagcaaacgtccaaaataggaaggtctctttcttaaaaaaagtattcagctacgcaatggatgaatcattaatgctcgacaatccagccgagcgcaagaaaatgaagcgtactgataaaaagaaacgtcgcaggctttcatttgatgatttcatgcttatacgtaatgccgctgaaccgtggttacgaacagcaatggatcttgcattgcaaaccactcaagcacggttagaagtttcccgtatcagatacaacatcaaatcaccgaaggaaggtgtttgcggctgtgtatggtatacggagccaaaaaacggcattcatggtatgctttatattcacaggcaaaaagtccagcataaagaagcatcacacattgcgatcccaattggttcaacgataaaagctatcatcgatgccagccgggataatatcgcaagcccatacgttgttcatcgagtaccagaacgtttaccaactaaaataagcaaagaagttaatcatcccactcaaattgctcccgattatttaagtagggcattttcttccttgagggataaagttggcgtggcgtcatgtctcccacttgatgaaaggccaacatttcacgaaattcgggcgttggctgctcatatatttaaagaacagggtatagatccacaagctcggatggcacacagtgacgctaaatcaacaaaaatttatactcaaaaccatgtcgattgggtcgaggttccacacgcagaaatagctatctgataagtggaaaaattcgacttaacttattgatgcatataatgcagattttgcagattctgcactgtttgtatttacagtcaaaaccctccaaacccgcatcacacaaggcttttagctagataatgctgtcgtcatggggtgtcgggggtcggaggttcaaatcctctcatgccgaccaaatttccccagaaaaaccaacctgttagggttggtttttttatggctgggatttagctggtgtaaaactccgcttgcccaacttcattcatttgggcatctgcggccacttaatatcagacgcttgtaaaatatctacacaagtgagtaatactctgtattttttccaatccaacaaagcggctttttctgcttcggtagccattttaaggtcaaccaagtcttgcagcaatgagagcgtttcatttgtgacctcgtctttaagatacaaaaaagccgcaattaagcagctaggattggtaggataaaacttagatttacttattctgatgagttttcagcgtgcacttgttcagcgctaaccatgcccttgcataatgaatgaaactctttggtactgataccagcttgtttcgccattgattttatcaagtctctggaaaacggcgcatggtgtttatcgacagtgactagccattaaccgccctcagttttcttgacccattgctcatgagaagtcccccttttaggtttcatctcaaaaccaagagcagtaagccctttaatgacttcggcgtatttcaacggcgttaatttcttaaaaaacataacaccaccctacatcaagcgggttcacactgttcattaaaaactttagctaggccactgtcttttctgttcatgaaaattcgaaaggcaattcgccaatatttaaaccacatagatagcggtgcttttcggcttaacatctgtttttcgtactgaggttctgatttcacctcactgaggtaatcttcaatctgggcttcgagtttatttactgcttcatctatattgtcaccctgtgcagccaaagaaagatccaaacaggcagctacatacatcccatcttgacgataagccatgcaacgtaatctcatttctcttctcctctgtatcgggcaactagatctatacagaccgtatagaaatgagtgtaatacgtttaatattgactaagcaagttcagaatgtaatccatccctggcttagggttagaacggtagatttccaaatcttaagctgtttaatactcgccggactatgttcatgtttcgtggatattcatgtgacattgaataatatttaccttcaagcctatgttccgcagctctcagaatgggataaacatcagatattgaactaatcatctcgacagcatctcgccataaccagcaaagactacacagctcatcatcagtgaattgttgtttatattgtttaatttcgagtgctggtaactcggctttaccaatagattcatcttcgggcacaagcttatgaacatactcgatagcttcagtgattttatccattggcagttgatcaatatgagatatattaaaacgttgatggatgaaactgtatgcttctgaacacatcatcccacgtttaccaacaagcatatttacagcatcacgtaatagagtgtgttcatcagttatgattttaggagagtgataattccctactttcctaattgatggcaaaacttcatttgtgacccacttacggaaacggtgaggaatagagccttgcttaattgcatcacgacaacgaagtactaaggtatacattccggattcgctgacaacattaatatcatcctgatgccctatattaaacatagaccgctcatcatcatccaatctttcaatagcttgcgtgatattttgaatttctagagcagagcaaacatcgtgagcaacaaaccacggctcaccatctttattgataacgcggatttcatgagatccgaatttgaatatagtgaaattactttcagctttaattttagctaatgcattcatatggccacctcgctactcaagaattttgatattttcagtcaaaaaaacttgctcacaacacgctctgaatcatcatctttagcaacagctatgattttatgttcgagtaaaccttgttaaagtttatcttgataaccaactcaattctttttacccaatcgatgatagctccacgttttagataacagtgtgtctgcttactattattaataatggcccacatggtaaggcaaaaaaagagactgaataaaagtcacatgcgggctttattaaataatattgttcagcaaaacacctcgttgttacttccaaactatttagccgcttcaattcgttgagtttcaagcattatcggtgtgtggtgatgtccagtaaccgcgtacataatggttccggttactttcacgcggtgtccgataaggcttcgatacactgtataaaattcctcctgaaccaccagttgcatcagactacgatccccccattctggtgcacccttggcacattttatcgtcttatccggttgcagcacccaataagtttcagggctatccccgttttccacgctttcataatttggcgggccgggataggtgatccttaataaggtgccatcaagcgtaattttttgtctttctttatagcagttctctgttgttttaatcgcagcaatttttttgtacatttcagatgaccgtttatacccaagaaacttcaagatgcagtttttagcacctgaaaatggtcgttaattctagacatcagcgagtccgctatatccggtagcgttgtggtgaaaaatttgaagacgttgtctcgaaattcatgtttatccgcgaaataacggttatttcgaacctgttcattcatgaccttccataatcgttctatcgggtttaaatttggactatagggaggaaggtaatgtaactcaatattgctaacataagcccactccttcacaagatgagctttgttgtaacccgctccatccacaataaggtgaattttttgatgatagtcaggataagactttcttatttcattgaaaaaacagcaaatgttgtagtcgttgatggtctgatattcctggaacaccgtacgaccaatggcattcaggttgagggcacccaatatattcaggcgagtccggcttcctgttgttttgacggtttttttctcgccttttcgcatccagccataactgagtttggtgccttgagtcgggtgaacagcatcaagaaaaaggatgggttcgtctttcgctgtgactttaagattctcataatattcaataaattgtcgctgtttttctgcgtcgaatttatgagggacgccacaaggttttttataagaaaaaccctgacggtgtagccatttattcatgccgggaatgctaaaggtaatattccagagctgagcaacataggccacgatttcatgggtgtgatggaaaagatgttgagataagtgattgattaaaaaatcagtttgttctcgggaaagcaaactatcagaccctccattatcagatttaagtttaccttgattaaggtaatcactgatatggcggtcaacggtggtctgatggagtcgcaatgcctgggctatcatcacagaactccacccttcagaagccagaaggatcgcttttattctgtctcgtacctgaccatcacgagtggtgtcgtgaagacgttcaagtttgattttttgttctgatgtaataaatattttcatagcgaggataatgatctccatttcggataaaatcaagcatcttcaatgattacgggtatataccaatcttgaaggcattcaactaccacgcatttctcgcgaagttcccaattctgttttaccagcgccttaaagtctacattgttgcctgtagccaatttggcctgaaggtaatttatatataggttgtcgtcagcttgggataatgcaggggtcgaacagattaacttttcagccttactggtggcttttgcgcaatcaaagctcgcgccgaatgataggaatgacatactacacagtattaatgccaaaaaacctattagtgttttcatacactactcctattggtgatttttcaacatcattttaaatacattaaagttaaaattacaacctatatttttttctaacttacaatcctcgcctcagaaaactaatggtattcattaaccatgacaaccaccataaaactacattaaaaaatccgactcctgttgaggataaaactcggacgttaatagccgattattaacaaaaaccattatcattataagaatggcctgtttattcaggccactgtcattattttggttgctccggccattcaatatcaggagcctgtgaaatatcaattctgttcagcattactctatacttcttccataccaacagagccgcctcctcttcttgagtcgcaatccctaaatcaacagcatcttgtaatggtgctatttgctggctagactctacaataaattgttgttttttactttcaacatactgctgcaattcttcttttgttggtggtgaaatatcggcccattccggtaaaccattttgacctgctatacgatattttccttccggtgcattattcgcggcgtattcttgataaatatcaagactaacctcaataacatcatctggcaatgaaccagaagcaatataattctgttccaattctattggataaaatccgtttgttttggcactataataatacattctttcttctccttaataaccaataacaaaaaaataaacaccacttataccattattattgtaatttgatgaaacagaaatatgtatctgagacttatttaatggctttccataagcagaagttacatcagtattgttatttggtgctgatgaaatagccgttacatgaagcgataagagctcatttggaaataaaataggcaagttcacaatttttccctgattatcaccaataggtacattaccccattgataaatcattccagtatcaccacatctccaccatccatttactgataatatcgctttattacgatcatcttccgttaaaattctttttttacctttaaacttaccatctttgtcaaatgcatacgtatgtattccaaacccctcctgacctccagatgtactaccgtattcaaacgaaattcctcttgagtgctgaatccccgcactagggtgagctacatgaattgccaaaccacctaagtccgcccaaccatttggacgcaagaaacctgacaatgacaaatcccgcagagattgatcgtcaaatacatttgctgtcttagataaaatacaaccagatgtttttgtattcgtatttaaccgaataaatcgattatcagattctactttgattttttgttctaatgctttatttaattgcgtagtaagtttcgctacattaccatcatccaaaacatcactgttagattctgtcgcaataaaatcggctacaacagatgatatagttgatgcttgacgtaatgccttatttaatatgtaattatcaataacctgcttgtctggaaaccctttcagcaaatccgtagatgcttcatagaatggttgactgggaacattagcattgctaacaatagcaaaagctttaaaatcatttttggcactcatatacatttccttaaattaaataacatgatttcatcataaacatattgaactatcactaaagatgatttctcataattcacatcaataatagactattcataaaaacaacaatgaaatgtttttataactaaaaagattaactatttttatataattggcaacaatcaatagccgccgaattataatcaaaacattccaaaactcattatattcaatttcataaattaatatttttcatttctttaaatttcaccttcaattctttttttaagttacgaacataacattaaagtattttaattataacaccaacaaaatggactgagtaaaagaccacctcgccaagaggtggtcttagctgtcattccgcagctatatctgtaatgtactgatttaaaatcgtttgtataaaatttattcatttattaattcttaattaaaacaacaaattacgaatgcggtgcggaatgtcggcttaggataacaactgaaaataaaaatcatttatttttccactgtaaacatatatcaatattctgttaaaaaccaaaacgtagagatttacttaggacatatttaataattaaatcacgttataagcaattatcttacaacaatattatatgctgatttcaagtcaaatttgttaacccatgttaacaaaaccattataagaatggcctgtttattcaggccacttttattattttggttgttccggccattcaatatcgggagccagtgaaatatcaatcctgttcagcattactctatacttcttccataccaatagagccgcctcctcttctttggtcgcaatccttaaatcaacagcatcttgtaatggtgctatttgctggctagcctctacaataaattgttgttttttactttcaatatactgctgcaactcttctcttgttggtggaggaatatcagcccattccggtaaaccattttgacctgctatacgatattttccttccggtacattattcgcagcgtattcttgataaatatcaagaccaacttcaataatatcatcgggcaatgaaccagaagcaatataattctgttccaattctataggatagaatgaatttgtctttgcactataaaaatacataattaatatcctatcgccaaatatcttacaaaattacctgctaactgagatgcaccatttctacatgttacaataaattggcttgcagaaataggtaaagcagcaactccagtgccagaattttcaaactcagaatatgttgcaacgatctggaaacaagcattagggaatggaatcgggaagtatctgtaatcatttatcgccccacagccatttgcctggccccattgaataattattccagtatcaccgcatttccaccaaccgttcacaaccttattagccgtattcacattaagattacaacacttggcaatttttttgtctaatacgcttttgaattgtgcggagattttagttacattgccatcatccaaaacatcagtgccagattctgtcacaataaaatcagctatagcagatgatatagttgatgcttgacgtaatgccttatttaacatgtgattaggaatatactgtccgtcttcaaacccaacaggcaaccttgcatatgcttcatactcttgttgactgggcacattagctttatcactaatagcaaaagctttaaaatcatttttggcactcatatacatctccttaaattaaataacatgatttcataataaacagattgaattatcactaaagatgatttctctcaactcacatcgataatagtctagtttataaaaataataatgaaatatttttataactaaaatgagtaactatttttatataattgacatcaacaaataattcgatataccgtaatcaaaaacatccccaaaaccattatattcaacattagaaattattatttatcatatctttacttttcccttcaattattttatctttaagtcacgaacataacctttcaatatactaattataacaccaacaaaatggcctgaataaataggctatctattcaggcccgttaacagcgatttttccttatcacttcccatattattaatatatagccaaaatccatatttaaattctggctatattcttaaagcattcaccgagggattactaccttaattagcatcaaataatccaataaatagatactaacctaatactgtcaaaataataatttatccttatcttatacacctaaataaattaccggtatcatactaatatttagcgggcgattttcgtctgccgttggtactaccttcgatgcatcaaaagtagcatatgctgaatatccatgattactatgaaccttcgttcccgcagcaataactgttgccgtactcctaacaccataaaatactccactggtacgagtaaaaagcccatgcccctgccatcccagattacctgtaatatttctaatcgcatcttcctgcatcacaccaggttgcaaaccagcgcgtacaaatatccctcgtccatcaacaaacaaattagggagattgattttatcaccagtctgtttaatcccccatgctgccttatatgcatcagataaattatttaatgctctaccaacaacagaatcaattaggtgaacatcaccattcgcaatatactctcctttagctaaatctgacgccggatgtgcagataaatagatatcacccggccgcttagctccaacataaaagactttacttaattgtgcagtgagtttagctatatcaccatcatccaaaatatcctcgccagattgttccgcaataaaattagccaagacagatgccattattgacgtttgacgcaatactttatttaacacatgagtgggaacactatatggtggaaatccagtcgataattccggagtctcttcatatagttgctggcttaccacattagaattattactagtagaaaaagctttaaaatcattttttacgctcatatatcccccttagatcaaagatattattttataattaacatattggatcattatataaatgatttatacccgttatctttcaagttgcctttttgttggctgcactctctcaccccggtcacatagttatctatgctcccggggattcgttcccttgccgtcgcgaagcatctcgaaatccatagggtatatattaattcatgtagattaaaatccagctcaaaaaagcaataattaaatattctcgcaatttagaatgttaattatttttataactggctgaaacaggcaatttaatatcaaaaaattactcttatctcctctctttaatttcctattgcaaattttctatttcaagttccagactgaatatttcagtatcttctccccaacatcaacaaaactattggatgaatgctctgtttattcaaatcattttttcattatttcggctgctccggccactcaacatcaggagccaatgaaatatcaactttgctcaatattatcctatatttcttccattccagtagagcggctttttctgcttcggaagcaacgcctaaatcaacagcatcttgtagtggagcaacaagattattaactttagtcaataactgagacttctcatgttctgcttgctgtattaattcctctttggttgcagcataaatattatcagattctgcttccatattctccccaacagccttgtcagaaggtttattcaatgagttatattcttgcgcccaaggcgtccacggactatcgtggaattggctacgcgtatatacccgactgctgttataaacaaaataacgttgaataacgcctgctgctttcaacacaataagcgaacccgcaaacggctcagggtaattcgcgccatttttggcatgagcattatactcttgataataaatcccaggtattttataactatttaaatccgcgttatcacctaaattaatcgactgcccggcgaagatatcttgagaagtaatattgatatccgcagctaacgcttttccattaatttttcggagtcctgtgatatatcgagcatcagattctgcttttgcatatgctcccacttctccagcagtaggtctattcagtgtgttatattcttgcgtccaaggcgtccacgggctttcatgaaattgactacgtgtatatacccgactgctgttatagacaaaataacgttgaataaccccggccgctttcaatacaaccaacgaaccagcgaacgactcaggataattattaccatttttggcatgagcattatactcttggtgataaatccccggtattttataattatccaaattggcattgtcacctaaactatgcgcctgcccggcaaggatatcctgagaagtaatattaatatcctcagttaatactttcccattaacttttcgggtatttggtattctggtattaatactttcacgtaatgaatttattatttcctgaaccaacttttgcgtaaccgctaatgtatcactattacccactacatcggtaagctgaacaataccttttcgtgttaatgaggcatttggaacttctgctgcaattttttgctctaaggccctatttagttgatcggtaagtttagctatattaccatcatccaaaatatcattaccagattgtgtcgcgataaaattagctaccacagatgatattgttgacgattgacgtaataccttatttaacagattaaccggaatattatctggtggaaatccaatctgtaagctctggttttcttcatactttacttggcttactacattagcgttatcactaatagaaaaagccttaaaatcatttttggcactcatatacaatcctcaaattgaatcatattattttgagaggaaattcaaaaataaaaacatctatttttgcattgcaaattacatatcaatatcctattgcaaaccagaatgcagagctttcagtctcgtatgcccaataactaaatcctgttacagacaattgtcttgcaacaacattatatgatgattccaggttagatttatcacttaatgttaacgaaacatttacacaagcattaggaaactgaataggaaaattaactggtgtatcatgtgcagcccaatttacaatcccccactgataaattacccctgtatccccacacttccaccaaccattcactgatttcaacgctgtatttttatttcctttagcattaacgaggttatcgacttctgcttttgtatacccgctaataaccctgtcagcaggtttattcaatgtgttatattcttgagcccaaggtgtccaagcattatcatggaattggctacgtgtatatacacgactactattatagacaaaataacgttgaataattccagccgctttcaacacaataagcgaacccgaaagcggttcagggtaattgacgccatttttagcatgagcattataatcctgataataaatccctggtgttttacagtgatccaaatttacattatcacctaaactaattgcctgcccattcaaaatatcctgagaagtaatagtgacatccgtagctaaagattttccattcaccctgcgaattcccgcaatatatcgagaatcagattctatttttgtatatgcgccaatctcatcagccgtcggtttattcagcgtattatactctctcgtccaaggtgtccacggattatcatgaaactgactacgtgtatatactcgactactattatagacaaaatagcgttgaaccgtcccagccgatttcaatacaacaagagcgccggcaagaaattcaggataattaaggccatttttggcatgagcatcatattcttgatgataaattcccggtattttgtagctatttaaatctgccttatcacctaaactaatcgcctgcccacccaaaatatcctgagaagtaatggtgatatcttcagacagtaattttccattaatttttcgggtattggataccttagcattaatactttcacgcaatgagtttactatttcctgagcaagcttttgcgtaaccgctaatgtgtcactatcgcccagtacattagtaagctgaacaatgcctttttgtgttaatgaagcattaggaacttctgttgtaattttttgttttaaagccttacttaattgctcggtaagtttagctacatctccatcatccagaacatcaccgccagattgtgtcgcaataaaattagccacgacagatgcgattgttgacgattgacgtaatactttgtttagcagattactcgtaatattatctggtggaaaccccgcctgcaaactctgatctttttcatacttctcttgactcactacattagcattgttactaatagaaaaagccttaaaatcatttttagtactcatatacaccccttagattaaatattataattaatatattgaattattattaaagtaatcactcataatttacagcagccatagtttaattcataaaaataataataaaatgttcttctaacttagaagaataattatttttatatcattgacggcaagaaaaaaaccaacaaacttcaactgagaatatattcatagcattcatattcaacatctaaaattatttcactttgtcattacttattttatatttcatattccaaattaaattttttagcattataactccagcacaaataaaaccacggtatatacccgctatctttcaagttgcctctttttcagatttattaaataaataatataaaaacaataatcacaagtatttttattacaactcatcaattaaaatggatgaaaataaatttattatagtacagaggtacttttaacattgttgtaaacacattttctattttttacacgattttttattggatcaaagtgcagtctaaatagactgcgccttctcaataatatgtcaaaatcatataactttatttctactttggtggcttaaactaattaacatcaaaaatgagaggagtatctttaaaccctttcaatacggctttgtctcactagattgatgccaaaccgataacgactgcttagctatcatgttccattgtcctctcatgtaacaactgccaactgcatttgtaatcttaaaagcaattgtcagtcatatcgcttggtatcctctccccgcaagatacgctcacttcatcacctaaaacacccgacacaaaattattttaatctttaaaataatttttaaaaactgcttgactctgaagtttttctgattaaaatctcagccacaatttagattttcgtgaaacaaatcacactttaccaataaagagaattcatcatgaaatctgttacatctttcatatcaagtgttcatagtgtcgttgtctacttgtcaacaccttgctttctgtaagtctgctttttaaccgatgcgtgaaaggccagtttccaagctggcttttattagcctaagagattcaatattggaggtaaataagcaatcgataaataaaaactctgctactaaatcatttatcatatattctcagcctaatagccaagaatatatgaaataacaaccaacagatattaataattcaacgcatcgagaagtcgtttcttcaatgatgcaacatcatccacactattttgaaccagcagagtaagattagctatatcactttccagagattgaaccttctcttccaattccttattctttgcatctaataatatatcaatccttgccgattcagcatgtaactgctgaccattaaccgcctcagtactgtgatttgaaatctccccagccgcaacatgtataatcttacgttcatggccggtttttcctacagaaacaacattcggtttattagcaatagaatctgcacctaatgcaatgctccctttttctgttgcagaagcgtgttgaccaatcgccacggcctgagccgcactcgccgtcaccttttgtcccaaagcgatagaagccaagccattggatacagaatcagccccaatcgcaataggccaaatgactttcgtatcaccttgtttacccgcaatttgattttgcccaatggcaatagccgcttcactgatggttttagaatttcggggtgaagcaccaattgcgatagaatgtattgccggcgcttctgcatgtccaagtacaactgaatctttaccagttgtttgttcagctatatcggtattttcaatagacatattaaacctcttaatttataaattaaataaccatgcgttgtttgaaacttaatacagtgtgcgacaaaatatgatatggattacgtgaactcgtttcacatatcaaaacttaaattaacgttatatctattccgtcgacaatattagatataaatcccaacttgtaaataaattaaaattattggatagtggaatatattgtatggaatttatttcatgtattatcaagctttatggaatatatatccaataaagttcatcataaccaattaattaatcacctcaatattaattggtttttatatacttaatccaagtaaacataggagaaaactttattattaaccttaaattatttgaaaaataattatccagtatacttttaacacccaaaaatataatcacatttggctaattataattttaataataaatactctcaatgaaaatttttaccactgatgatttcgcagatttcatggacaacaattcactaactcaagatattcccaataaactgttgaaagtttataatctattagccaaaaaatttgttaatatcaataatagtaatcttgaagacaacttataccctatggatttcaagatgcatcgcggcggcaagggagcgaatccccgggagcatagataactatgtgaccggggtgagagagtgcagccaacaaagaggcaacttgaaagatgacgggtatatcatctgatttattaatcgaggtaacatataatgaataataatcgactcatcaaaatgcagaaaatggctgagcgttttcatcaatctggcacaatatcaaatatcaccatgagagaaattaatgcattggttaaacaagataaaaacatgaatcactcttcatctgatgtggtgaccggaaaacgcataattaagtgaaaacatattttcccggacgcatttcactaaccgtatcagccaattcaattaattcagtagggtaatcttgtccggtaatgattaccgtctgattaattggccgttcgcttaatgccttgataatttcgtctagcaatagataaccgttatttatcacgcaaaccaattcactcagcacgaccaatgataattcaggatcacgcatcatgcgcagcgcgtggtgccaaacctcagagcaagcagcaatatccttagcacgattttgcatttctccagtcaagttcattgatattagctgaaattctactccatgctgctgcaacaaaacacgctcaccggctgaccattcatcgcgaataaattggataacgccagcctttaatccatgacccaacgctcgtgtaaccgttcccattgctgcgggggttctccctctgccattaccggtatagataatgacaatcccccggttttcttgagcggctgcaacttgtgccataaatctctctttttgccgctgttttctctgtttatatcgctcctcactcatttgtccagctccaatatattagtcaactgtttgttttgtttgtattcgcttgagatgactcagagaataatgtttctaccacccgatcaacttgttgatgatcttgactgaccaacgattgcattaatcgctcattagtgaaaaaccgctcccaaaagtgacgacgtgccgccaaatgatgaaaatgtcgttttacccgctggcgaagtgtcccaccgtaagcggccagacgaccaagatgcatcggcagcagccgttcgagtttttcacgccataatctgaccaataccggcgcgtttcccccggaggagatagcaatcaccaagggtgagcgatcaatcactgacggtgtgataaaactggcttgctgtggctcatctaccacattacaaaaaatgcggcgctccgtcgcacaatcacacacatagctattcaccgccgcatcattagtagcagcaatcaccagccaacaatgctcaagccagtgaggctcaaactcaccgcgaatgagtgttacttggccgttatccccccatagtttaaattgcggggtaaattcccgtgcgttaactaatagatgtgcgccagcatctaataacagacgcgctttacgctcggctacctgacctcctccaactagcagacaggttttatcccggatctgacaaaacatcggcaaataatccaacataaatctcctcctatcgttaacgcacaccacccggaatcatggtcagcaagtgctgacggggataaaaacgaattatgcccctctgtttcagccaccagcatagatattcaacatcatgatggtgacgatcgcacaataatccgacgacactgccactatgagcaacattcaacccgtagatcccactccgttctaccaattccaacaaactgtcaaacgccggtttgaccaacaacttttgactggcctgcgcactgagcgtcgtggcttcgcccaaccgccagtaattccgagtagtcacagcctgacaaaatagtttccaagcacgctctagcacggaggcattttccagtaatgccggatggcgatctaaacggtgataatcagctgtgatcacgatttccgggctttccaataacaaaatgtctatagatggctgccagtcacaagcaatttgcgtggtacctgtttgatgatcgaacaaggtaagccgactgaacaacgtgctatccgtaggctcaagctgtacgcaaaagctagccagtgtcgtttcatcaagtgttttccccaaataacgcgccgtcgccagcgctgtagcggcaatatcagcggtactacttgccagcccttttgccatcgggatcgtagaagtcaaggcgatccgtaaacctcgcgccatctccaccgacaaaccaaaatacgccagaacagttttcatcacttggcgcatacggggacgttcatcttttcccggcacgccatctgtaacagacacttcactgaaccaattcaccggacaagagatcaatttctcaccaccaagaatccacccttggataagttcaccacacgatgcaggacaacgcgcttcagccataaccgaatacctgacgtaacgccgataccagacggcgattatcatgctcgcctttaatggcgacccgataatgagccgcatccaagcccggataattagcacaatggcgaatcaatattctctgtttcagcaatgcgtgttgaagatcgatttctgggcgcaggcaacgcaggaagatataatttgccgagggaggccaaacacgtaatgccggtaatgcagctaatgcctgataaagccaacgttgttgctcagctaaccagcggtgtgttgcttgaatgtaagcgttatcattaagcaccatttcacccgccaacgccgcgaaagcattaatggtccacggctcccgccagcgcttcatcgcccgaatccccattacatcactactgaccagataaccaaggcgcaaccccggaatagcaaaaaatttcgtcagtgaacgtagaatataaagacgaggaaaatgcgctatctgaggaataaatccagcaatatccgggagaaaatcgataaacgcctcatcaacaatcaacgcaatattatgctgacggcaacgttcaaatattgcctgcaatagcacagcatctggcatcaaccccgtcggattgttcggtgtcgcaagaaacaaacagtcaggccgatggcgttctaatgccatcaacaagcgttcatcaggttgatagctatccgcttcactcatcacatactcatcaatctggcaatccacgcgctgcaaggcgcgccgatattcagcaaatcccggtatcaacaacatggctcggcgcggcttaagataattcaccaccgcataaatcaattcagtcgcaccattacccgccatcaggttttcgacagggcaatgatgagcctgcgctaacgctgcatgtaaccggcgatattctgtatcaggatagtactcggcacattgcaattggtcgataatggccgttttcaaggattccggcattcctaacggattgatatttgcgctgaaatcaatcatctcttcgactgtaacaccgattttcagcgccatttccagcacattaccgccatgttcgctcatcaaatattatccccaaatgttaaacagagaatcagagtgccatcagtgatggaacagaagacaacaatagatgatcccgactaaaagccagtgtttcccgcaaacgcaccacatcaccaatcacaatcaatgctggtgcactcaatccctgagcggctacctgctgagccaacgttagcagggttgcgctggcaacctgctgttgctgatggctagcatacatcacaaccgccgccggcgttgtcggcgctttaccgcctgcgatcagttgctcacagatgctcgccagttgagtcattcccattaagatcaccaacgtaccttccaactttgccagtgtcgcccaatcctgtgattcattttcctgacgcagatggccggtaacaacatgaaaacctgaggcataatcacgatgggtgaccgggatcccggcacaagccagaccaccaatggatgaactgatgcccggtaccacttcaaaagggatcttcgccagtgctaaagcttccgcttcttcaccaccacgcccaaacacataaggatcgcctccttttagccggacgacatttaacccttgttgcgcacactctaccaagatctgattaatttgctgttgcggcactgggtgatagttcggcgttttgccgacattaatcattttgcaatcatcaggtgcttcggataacaggtccgggctgactaatcgatcatacaccagcgcctcagcctgacggatacagtgtaatcctctgacagtaattagcgccgcatcgccgggaccggcaccgaccaaccaaacttttccgctattcatcatatttttcaccctgtaacgaaagtctgttggaagatatataaccgatagccagcaacacgatctggtgtaagatcaataattcttcatttttattaatgtattgacgataaccctcggttctgacgcattgttactttatctgcttgtttctcttagcaacttcgccctgcatcttgtatctacgccatttttattatgacccctaatatttttgtgaccacagttgattttccaaccaaattgccgatatttaatactgattgataaaaaaaaatgccaacatacgccttattgcagacaagaggcgtagcgatggaagccaaggagttattcagtgtcggtattgacatcggcaccaccaccacacaagtgatcttttcgcgtctgtcactggtgaaccgtgcagcggtatcacaagtgccacgctacgagtttgttcgccgcgagatcatctggcaaagcccagtgttatttacccccgtagacttcgccggacaattgcgtgaagacgaactgttcagtctgatccaggcacaatatcaggccgcaaacatcgcgccggaaagtgtcgattccggcgcggttatcattaccggcgaaaccgcgaaaacatgcaatgcacgccctgcgattatgacgctggcacaaaaattaggggattttgttgtcgcaacagcagggccacatctggaatcaatgattgccggtttgggctccggcgctcaagctctttcacagcagaaaatggccagagtgctcaacattgacatcggcggcggcacagccaactacgcgctattcgatgccgggcgacttatcgcctccgcttgcttaaatgtcggcggccgtttattggaaaccgatcctcaagggaacgttttacgcgcacatccgcccggagtacgcatcgttgattcactgtttggcgaaaataccgatattcaacatctgacagccacgcaattacagcaaattgctatgcggatgtcgcaattgctgtgggaagtcgttaccggacaacttacgccactggctcaacaattattgatgaccgagccgctgccaaactgtgatgaactaaattgtgatgaactctacgcagtcaccctctccggcggggtaggagaatgttatcgtgaagcatcggagcatgacctattccgttttcacgatttagggccattgctggcacaagctatccatcgtgataatgatttcgccaaactgccgctgcaaatgccaaaacaaaccgtgcgcgctaccgtcattggcgccggcgctcatacattatcgttatccggcagcactatctggcttgatgcactatcgctacccctgcgcaatattcccgtcgtccatcccgacacagaagccactgaatcactggcagaagcctggcaacaagcactgacacaaatggacctgcatgctgagcaggatctatatgcattggccctgcccgatgccctgccagtgaattatgccgccgtgcagacatgcattaccgctttacagaactttgccgcacgctatccctcttctcacccgctgctcatcgttgcaggccaagactttggtaaggcattgggtatgctgttacatcctctgatgggagaacggccgctggcggttattgatgaagtgatcacccgcaccggggattatatcgacattggcacgccactatttaatggcactgtggttcccgtcactatcaaatcactggcttttccttcctgagagagcgtaaacatgaaattgaaaacgcagctttttggtaagacctatcagtttaaagatgtcaaacaggtgctggcaatggcgaacgaattgcgttccggggatgtgctagccggggtagcggccgaaagttcccaacaacgcgtagcggctaaacatgtcctctcggaaatgacgattgcggatattcgcatgaatccgatcattccttatgaagaggattgcgtgactcgcattattcaggatgacattaacgaaattgcctacgccggtataaaaaactggagcattggtgaactacgcgaatacatactcagcgatgatacccgcgtggatgatatcgcctttctgcgtaaaggaatcagttccgaagtcgttgccgccgtggcaaaaatcagctccaatgcggatctgatctatggcgcgaaaaaaatgccggtgatcaaaaaagccaacaccaccattgggacgccgggaacattcagcgcccggctgcaacctaacgatacccgcgacgatgtacaaagcattttggcccaaatttacgaaggactatcgtttggcgtgggtgatgcagttatcggcgtcaacccggtaaccgacgatgtagaaaacctcacccgtgtactagataccctctatgaggtaatcgacaaattttccatcccaacacagggctgtgtcttagctcatgtcacgacccagatagaagccattaagcgtggtgcaccgggcggtttgattttccaaagtatttgcggtagtgaaaaagggctaaaagagtttggcgtagaattggctatgttagatgaagcacgtgccgttggcgcggaatattgccgtcttgctggcgataactgcctctatcttgaaaccggacaaggctctgctctctccgccggtgctcactttggcgctgatcaagtgacaatggaggcacgaaactacggtttagcacgccactatgacccatttctggtcaataccgttgtcggtttcatcgggccggaatacctctacaatgatcgccagattatccgtgccggattagaagatcactttatgggaaaactcagcggtgtctcaatgggatgtgactgctgctataccaaccacgcagattccgatcaaaaccagaatgaaaacctgatgatcctgctggcaaccgcaggatgtaatttcatcatgggcatgccgctcggtgatgacattatgctcaactaccagacatcggctttccatgataccgccactatccgccatctgctcaatctgcgcccatcacccgagtttgaacgctggctggaacagatggggctgatggcaaatggccgcttaacatcacgggcgggcgatgcatcgttctttttctgattctttgctgagataaatcatcatgaaccaaaaaacaattgaaaagaatgtaagcgagcgggtatctaatctgaaaccccatgcatcccctgaaatcactaacgaaattgaaagctgtatgccggatttaggctccttagaagccaaacagtggatcggtgtccaaaacccgaaccggatagaagtcttacaggaattacgccgcagcacggtggcgagagtcggtaccggccgcagtggtccacgcccacgtactcaggcattactgcgttttcaggctgatcactcccgttctaaagatacggtgttaaaagaggtcccgactgaatggatagagaaacaaggattgctagaagtgcaatctcaagtcagcgacaaaaatctctatctgactcgcccggatttagggcgaaaactcagtgcgaatgcggtagaaactttactgacacagtgtaaaacagcgcccgatgtacaagttgttatctccgatggcctgtctactgatgccattaccaccaactacgaagatcttgtgccacctctgttaaaagggttggaacaagcaggaatgtgcatcggtacgccgttttttgtacgctatggtcgcgttaaaatcgaagatcaaattggcgagttactcaaagctaaggtagttgtcttattgattggagaacgccccggattagggcaatcggaaagtctttcctgctatgctgtttaccaaccaactgtagaaaaaacggttgaagctgaccgcacttgtatttctaatattcatcgtggcggcacgcccccaatcgaagccgcggcaattattgtcgatttagctaaaaacatgctggaacagcaagcttccggcattgctcttagtcgttgatggaagggtatataccccttttacctcgttaagaaaatcatcaatataaagataaaaaataggatggcaggccagaacctgccccctgatttattaatcatagcccgacaataaatgcgatataacttcaagttctacattttgaacatagttactcatgttggtgaatacaattttatagtaattaacaatattaggaggtgatgcaagtatttcagtcttaccgggggaaatatcaacatagctatacatattataattccctagtggaccagcccaaaaatttacagccctaatatatgccacgctattgttttttataattgcgtcagagaaatcagtggggaatattgcattacccttactataaaattcaaatggctcgttagaattcatatataccatttttgttggcattccatattttttccacaaagagtccattacaaattcaatttctgcattttcggtattgctaagattggagactacaactttatagcggtaaaaaaggtcacttggtcctacgaatattttaagttcgctaggataaacatcaacatgactatactgctgataatctccaatcaaaccagcccagtaattgatagccctaattggtaccatactcttgttttttataattgccgttggggcaacacttggtattacaatatcgctattactataaatctcaacggttccaagaggagctatagagatagtttttttcaatgacattatttttttccttattatttctgttgtttagtaatatatataataggtagttttacctgtaaaatttaacttaacacttcccacgaacagttaaatattgaaatttgtcagtgaagtaaaaggaatacgataaacaaatttatcgtatataatttttcattcaatcatgtaatagccaaaatcagatactgttttttcctcattatctattctgataacatttttttctctcatttctattacaatggcagtaccatactactgagtacaacaaattttctaaaaacagatctaaagaaagcatttattaggtatataccctatggatttcaagatgcatcgcgacggcaagggaacgaatccccgggagcatagagaactatgtgaccggggtgagtgagtgcagccaacaaagaggcaacttgaaagatgacgggtataataagataataattatgttatactaattcattatatcaacaaaatattatgagattgaatagatggatttggaaaaattaagaaaattaaccctcagtagtggattcacatttaaagaacttcttatgctgcaaagaacctttaaaaatcttgacgatgatgaaagaagatatgtaataaagtattatacaaaaagcgataacatttacaacgttataatagtgcttgctgaagatgccggcgatcccgtgttgtttttctctctcatgtatgtaggttgcataataatggagattttcctctatgacgaaaattcaatatcctatttatcattaatatcgatcatttatatcattttaacaataatatgcatatgctataaatctttttatcaccgctatcgttataattttttcacatgcataaaattagttattttctatattcgtctcaaaataaaagaaaacttcaaacagttataaagaataagtattttacggtaagcaatttatagagttagaaaaatgagtttaaagaaatgaatttaattgatttaagaaaattaatattaaatagtggattcaccctaaaagaattgcttaggataaagagaaactttattattctacacaaggatgaccctgatatttatgataaatatcaaagcaaaacagattgtttttgtcattatctactatttatagctgaagaagttgctgcaccattaataatgttaacctcagtttgtttatttataatatcaggtatgcttttcagtgaaaaggaatatagtatttcattaatgtcattcatttacttactcttttttagctcgttctcgatttattatagtctttccgttagctgtaatcctgtcacaggattaaaattagcaatattctatattcgttttaaaataaaaaacaaattaaatcgttgaattaaccaataaaacatgataaaaataactaattataaaaccaaataaaaccgagtatgaataaatgaacctaattgacttaagaaagctaatattaaataatggattcaccttaaaagaattacttaagataaagagaagctttcttgtcctgcataaagatgccccacacatttataataaatatcaaagcaaaacagattgtttttgtcattatctactatttatagctgaagaaatcgccataccattactatatttaaccccagtttatttatttataataacaggcatgtttttcagcgaaaaaacatatagcatttcattgatgtcatttatttacttattctttgccatttctgcttttatttactatagcttctccgttagctgtaatttaatcacaggttcaaaattgttaattttctatattcgttttaaaataaaaaaacaaattaaatccttgagttaaccaataaaacatgataaaaacaactaattataaaaccaaataaaatcgagcatgaataaatgaacctaattgacttaagaaaattaatattaaatagtggattcagcttaaaagaattacttaagataaagcgaaactttattatcttatataaagacgaacctgatatttatgataaataccagagcaaaacagattgtttttgtcagtatctattacttatagctgacgaaatagccatacctttaatatatttaaccacaatttatttatttatgatattaggtatgtttttcagtgatatggcatatggagtgccattaatgttttcaatttacttattctttgcgatctctgcttttatttattacagcttctccgttagctgtaatttaattacaggttcaaaattgttaattttctatattcgttttaaaataaaaaataaatttcaatcgtcatgaagtttatttatgtcatctatcaaaagtttgactttatatccactacttaatacttgaatggttaacataggctttggtgttagctgccattttctggcaagatccgaattaatatatctgaacaatttccctgtccccggcttgacagaatagcctcctgatatattattcttggatttaaccggtttaagcttgagcactccataagtcccatataaacttgctacgagatcaactgaactataagcaacatcagctacatcatcaccataacctaaagcatgagaggcatatcgataacctttcctaaccaaacctattttttgattctcataaaggatcggactaatagcctcataaaaattactacctccatgagcaactagcacagcacccattaattgaacccttttagatcttacaattctccctgaattaattacagcaataccagcagctgtttgagcaataccagcaacaaccccaccgcctatttttgcgtatttaactacgccctgatcttcaaatatatcggttacaatatatttggtataatccttacgccttaaagcctgatattctttttccgttatttcatattcatcttttactgcataaatcaatctctttttttcatttacatcaaatgtatttttaaattcacgtgtttttatattaacaaagtcatcaacttcttttaaatatgacattctcaattggctatcttctataaaaaagctagcagccaagtgtgctttacgcttcaatgacgaagcgtaattatttaaatcataagaaagatgagatatccctttcataaaatcctcagtaaacgttgtcttcccatatgctatatgcactggtgccggacataatatgttcccacgttattgatttatacatcaaagataaactctcctgtggctgacattcattatgcgtagatgagtttggataaaagccattcaatgcacagatatatgcaccagtgagttttattttataatagagctctaaaccacctttagtggatgttctataaaaataaaaaatacattgtagcgattctttattcgttatagccaatcccagcagaggagaagatttatctattggctttcttatctcaaccggctgatggttaacatgttgacctctggttatattggaagtcaattcataaacaaatatatggtcttcatgaccaagctgacatgtgttaccaatagaatcaaccgttgaacatccttgtgatatcaaaccttgcttatcacccttaatttccaaatagattatattcgccatagaaagccatttttcagtaatattcaaagcatgaatatatattatattgataagaaatataatataagtattgattctattttagaagaatgtgataaatctcatggcaataaaaatttcgttaaccattttgtgttaggaatagaattcaactactgtaaatattctacttaaattaaccttgaaacccaaaacaactacgtatgatggaagtcattggcaagaaaatattacgagatatatttacctgaaatacttaaagttattattcaagaataaaaaaatcaaaaagagcgaaattcagtatcaactaaaatagaggatggcaggttaaaacctgcctcctgcttagtttggtaaatagtgaaactcttaaaatatgctccatgaaagttcaactaccaattccaaaactgcgatgtcacttcaatttccgtgttgtaaataggactaagattggtgactataattttatagaaataaacagcgttaacaggtgcgagaagcgttttcgtctcaccggggtaaacatcaatatagttatattgattataatctccaatcggaggagcccagtaatttatcaccctaatgggtgccgggccattgttttttataattgcctcaggatagccattgggaaatattatatttccgtgcttaaagatttcaaaagattgattagggtttatatatataattttcgatgacattttattttttccttattatagctgttatttgttggcatatataatcaggtgattttacctatcaaatttaacttaacactttccatgaacagttaaatattgaaatttatcagtgaagtaaaggaaaggaaaggaaatacgatatacctgttatccttcaagttgcctctttgttggctgcattcgctcccttgccgccgcgatgcatcttgaaatccatagggtatatacgaattcaccgtatacgagatttcactcaacagaacgggagagtttcatatttgccagcaatcaatatgggttatcaaattatcctgacaactaaaatggcaacacaatattactttcagcaagtagccccatattgttatacatcgcacaagccgcatccaccagatgcatagccaacgcagcgccactcccctcccctaaacgcatgtccaaatgcaaataaggcgctaattgcaggtgttgcaacgcaataattgagcctttctctgccgataaatgcgaagggatcaggtaatgacgcacatcgggtgcaattcgacaagcggccagcgccgccgcataagaaggaaaaccatccagaatcactggcagcccgacagaggcagcaccaagcattacgcccgccatacccaccaaatcataaccaccaacctttgccaatacatcaatgctatctctggcatcaggccgattaatttcaatcgcttgtcgcacaaccgccactttatgatgcaggcgttcacttgggaaattagccccaatgccgacaatctgttgtggatcgttgtccgtaaagacgctgaccacagccgccgccggtgtggtattcgccatacccaattcgcccacaccaaacagttgcacgccatttgtaatctgttccagcgttaaacatgcgcttgccaataacaaatcttcggcttgctggcggctcattgccggcccttgagcaatgttgccactgccacgctccaccttcatgttcactaatcccggcacaggatcactgtcaatgcccacatccacaacttttacatcagcacccgcattttccgccaacacgcaaacaccggtaatccctttcatcatattctgtgcatgaatagccgttgctgatttgggcgatatagtcacgccttcgtcataaaccccatgatcagcgaccatcacaataatctgcttacgatcaatatgatgacccgataatccccgcatgccagctagctgaatcgccagatgttccagacgcccgaagctacctgttggtttaaccagcccattcaatcgagtagcggtacgcgccatcgcaacgttatccaacggcacaatcgcattaatgatcgatgaaagtgtttgcatgatgttatttccgtgtctcaagctgccagtcagtccggttattaaatgttcgcaaggtagtaaatccatgttggatttccacgacactgtatgttccttgttcaaaatgaaagtgccacatagcagcaggcggtatagccaacagacgcgccagtaacaagcccaatactccctgatgagcaaccagcaacagattatcctgactttctggtgtcaacagttgctgaaccacgttctctatcctggccgcaaatgctgagaaagtttcaccgccagtcggggatgcctgttgccaatcggctaaccaagcagcccaagcttctgcgtcttcatgttgcaaatcacggtgatggcgcatttcccatgcgccgaaatgcatctcattgagttgtgtatcaatattagctgataacgaatgaccggccagaataatctccgcagtatgacgcgcccgccgtaacgcgctgcttatcgcttgcgaaaatgttactgccgatagataacgggcaacttgccgagcctgatttatccccgtttcagtcagctccacatccgtcataccacagaaaacaccactcagattcgcttccgtctgaccgtgccgaaccaaaaatagtcgcattgttgttactctatctcagatgtgtttaagagctgttaattcaaaaacacgtagattcagactcgtcttttagcatgttacccccattcatcataaaatgacttgcgaatgtgtgtcgtagtacatatctcgccagcctttttgctagcttgggaatcattgatttaataccgttttgggtagcgattacccaacgttcatactgttgcgcttcggactttgtgccgaagcacttacgaatatgcttgcccttacgggcgaacaattcatataagatatattactcatcatgagattccttctcttgctgactcaaccaatgaagcacagatctgacttcatgagtggtaatatagccacaattatcacagctgagtttataataataattagcatcactgtcggtaggttgttctggtgcgtgtctgaaaaaagtaacaaatgttttgctaaccgattgcccatgaagcaagtcagcaaccgcagctttgcttgtctcagcaataacttgctcaccaacactgtggcacatcgggcatattcgagttactttcttcgcgtccaagaacttgaagaaagtatcagcatttattgtttccaacttcttaataagtttgtttttgtctttcatttaatcactattataaatgttttcgtttaatgagtttcttaacttataaacaaaggggaactcactcccttgccgccgcaatacatcttgaaatccatagggtataagtttttccgcataaccgtttgacaagactcccacaggagatcatcctcatgttgaaacctccgcctggagaccttaaagtacgacgaaatccagataaggacttgggaagaataaactatgccagctaaaagacctaaacctattgttataaaaatgcccgattgccctgttgttttctgcctgccataccacccaacgctaacgctttcagcatatgcggagtttacagatcaaacggtcagaacctccaacaacaagccaatgagcaaagattgatactgacaaaaaagaagaaaaaagaagaaaggcagagaacgtgaagtaaatatggttttattattcctcttggatttcacaggaaactttatggataccagaacagcagaacctaccactgtaggtgaaatgttggctgaagagtttttgaaacccttgaaaataactcaacaacagttggcgaatgcgatgggtgtttctcgcaaggttatcggccaaattgtgaataattcccggcgcctatccgttgcagaagccacgcaattagccggtttatttgaaacggatgaggatttttggattaaccttcaagcagcgcatgatcgctgggaaagtcgccagatttccgcccgtaagcaatatgcacctattacagttattctttcagccagcacttagcgagaataggggttgggtattttgccaggaaatgactcacaatagcgccagtaaaaataccaactccccgacttccactgatgcaccaagggtatcaccggtctgaccgcctaaacggcggtgcagatacattgccagcaacccgataaccaacagcgtaatcgccaatgccaacacaccagaccagcgtatcaatagagcaatcaatattgccccacctaacaatgtcaacagtgcctgataaccgttaacccgaccgatatagagattccccaagccactcccttcacgagcacaacgctggcggtacattaataagataatcgcactcctgccggcaacagatgccgcagtcaaagccattagcatagaagcgccacgcagagataattcgctcaccaccagcactttcgccaaaataagcaagatcaacgccaacccaccatttgttcccaaacggctatcacgcataatctctagcattctttcccgcttacgggcagaaaatacaccatcacaggtatccgctaaaccatcaagatgaagagccccggttaacagcgccagcgctaatacgtaacccagtgccgccaagggcgcgccactccagggagccagcaaggtaaaaaccgccgacgccagcacaccgacgattaatccaaccagtgggaaactcgctatacctcgcacgtactgatcgatttccactccctgtgtccagcgcgatggtaccggaatgcgggtcataaattgtaaggtggcaagaaacaaacgcaggctcatttaatttttacctcaattcccgataccatcaaaaatacttcactggcagccgccgccagccgctggttgaccctgccggcaatgtcgcggaaatggcgggccagacggttctccggcacaatacccattcccaattcgttagtaaccagatatatcggggaagtcatgcgggcacaagccgctaacagatcgctaatttgttgctgaatccccacctctaatacagcaaagtccatttgttcaggtggcgtctctcccgcttgctcaaataataggttggtaattaaggtggtgatacattccaagataatcgcttctcccggtcgggtttgcgtcgtgataactgcaccgagatcgcgataaccttcccatgtacgccaatgagccggccgattttcgcggtgcagttgtatacgttcggccatttcactgtctgtcacgacggcagtcgcaatatataacacctgttcactcgcttgtgccaccagtctctctgccagcacacttttaccacttcgaaccccgccagtgattaagatcacggaaccgaaccttgtcgatgagttttcatacattgataaatccgttctatatccagatgttcgcgcatggctttcgccaggagatcaaactgagtctgtttgtagtgggtataatccagtatttccccttgataagccgccaatcctttgcgctgacgcaaagcgttaagcagagctcgggtaaaattagcgctatcaaataagccatgaatataactgcccatcacactgccttctcgattaaccgcaccatcacaccaaccaccagattggccgttacgctcggtaatatcgataaacggagttgcatccgctcccagtaatgagctgcccatatgaatttcataaccacgaataggctgctcaacgcactctgacagcaaaccgggtaatgctaacaagcagttaccgtttaccctagtcgttactttttcatgagcaaagcgggtttccatatccaacaatccgagaccatccatctgttcaatacccgactccaccccatcaatgatccgtttccccagcatttgataaccaccgcagataccgataacaggaacaccagcctgatgtgccgttaacaaggcatccgctaacccgttctgtctcagccattgcaaatctcccaatgtgtttttgctaccgggcaagatgatcaaatccgacggctgcaacgcggatggttgagtcacataacgcaagcgaacatccggttgcaccgccagcgcattaaagtcagtaaaattagcaatatgaggcaaacgaatcacggtaatatccagcgccttttctgtcgcgccatcatatttgcccgtttgtagcgctacgccgtcttcatcttccagatcaatatccaaccaaggcatgacgcccaatacaggcacgccagttaaagcttcaatctgttcaatacccggctggagcaggctgatatcacctcggaatttattgatgatcaccccttttacccgcgctttctccgccgggcgtagcagtgccaatgtgccataaatggccgcaaatacgccgccgcgatcaatatccgcgaccaacagcacaggggcatcaaccatctccgccatccccatattgacaatatctcgatctcgcagattgatctccgccggactgccagccccttccagcacaatgacgtcatattcactcgccagactgtgaaaaacttcgcaaatttgctgctgtaaactgggcttatactggtgatactccaccgcattcatgctacaagccacttttcccattaacaccacttgcgctttacgctcgctggtgggtttaagcaatactggattcatccgtacatccggttcaatacccgctgcctctgcttgaaaaatctgcgcccttcccatctcttcaccgttaatagtgataccagaattcagcgccatattctgtgatttaaacggtgcgcagcgataaccatcttgaacaaagatacggcacaatcccgcaaccagtacactttttccaacatcagatgccgtaccctgcaacattaaagacaagcccatcatgctatctccttcaattattggtgtagcagagcaaaaagctgctcctcagttttatagagcagcgatcttagttcgcaatcacgccttacctgatggaaagggttgacccggcgatcaatgtatccaatttgtcaatattcgccaccattgccaacccaatgaatatttttgctaccataccagcacttatttctcagtatgccattgtttattcactaaaatagtggagaaataaggtaatttttgatcagcgtccacctgatccaaacggcaccagcactgctcacttggcaatgtcgcatccgccatcaataaagcatgttcaaacagattcaggcgtgccaacaatgtactcacggcggcaaaacggctatagactttcatcagcaccacgcaatcatgcgtttgcaatgcctgctccagctcagcttctggtgcagtacaagacattatcgccattgattgctgttccatcgccagaggtaatacgctacgcgcggcaatcgcggcaaaagaggtgatacccgggacaatttccagccactcttgccgaccaattcgcgccagcaaaaagacccaagtactgaataacatggcatcaccaagggtgataaaacccacttgccgccctttggctacttcatcttgcagttgttgcgccacttcatcccataccacctgtttctcgtcgccattactgttcatcggaaaatggcaggtacgaatttccgtgtggggtaacaggtattcacgcacaatggaaagcgccagactatccccccctttacgcccagcaggtgcataaagcacatcaaggcgagcaagtattcgcgctgcacgtacggtaactaaatcactggctcccggaccgacacctatcgcataaagttttccattcatcacaccacctcctgttgttctgcctgtaatgcgtccgccagatgttgaacgaacatttcgcggatcagcggattttcacctagcccctgtaaccaagattgggtttttatcccaacagcttccagttgagaacgccacgaatccggctcgtccgatgccatatcgttaatcgcatgatcaccggccaccagcattagcggcattaaatgcactttacgtatcgcctgccgccgcaagcggatgatgatatggtcgatttccgggtagctctccaccgcgccaaccaatgccgggaaattatgtgaattcatcaggtgatcaagacacgcgtaggcagaaaaggcatggtgactggcaccgtgtcccataaacaccacccgctcatcctcggctaacggcggcatctgacttttcagggcaataagcagttgttgataatcggcaaaactgttaagcagcggcgtacccaccactaaacgttggaaatgatcactaaaggtacgcacttcactgacaatcttttcatattcgtcaccgttgatgacatggagggattgaatagccacatcctgatacccctcattgaccaaacgctccaacgcctgacgtgggttatccacctgtaaaccatcacgtttttttaatttacggatgatcatctctgaggtgaatgcacgatacagatcgcgatcacggtaagctgcggccaattgttgttcacagacatcaatattcttttgtcgggtttgatgatagctggtaccaaagctgatgattaatagtgcttttttcattttattgccctcattattcctgccaactggctaggtgttggacaaactcatccagcgaactaatctgctctccttcatctccctgtaaagtctgtgtaggacggcacaccacaatacagggaatattaagcgccagacagggcgccactttctgttgatatcccccctcggccccggactcttttgtaatcaccacgtcagggtgacaaaactcatacactgcatgattgaattcagccgtaaatggcccacgcaacgcgataatatgatcgacccccaatcctaacgcttcacactgaatcaatacctcggcggtcggcaatacccgtaccaacaatgtttttcccggtagtaaacgctgatatagctccagttgtttactgccggtggtgagcaagatccgttgtcctagtgtccgggcaacgtcgcaagccgcctcgatactatttactttgtgcaacagtggatggctcagtaagtcaatctcactgggacgctgatagcgagtaagcctcagtgacaaacgacgacatgctgtgagcacattttggcttagtgcatctgcataaggatgagaagcatcaatcacccaacgtactttatgctgatcaaagtaatccaccatcgcctcagcatccattcgccccaccaccacttctccctgaatatcaccggccagttgtctccctgcatcagtcgcaacagagagacgataacctgctcctgctgcatctagtgcctgacagagcaaccgggcatcgctggtaccaccgaaaacatggatagccggatgactcataattcatacccccgtggcgtgatcatcaatccatcacggcaataagttgtttgattgccaacaatcaccagactggtcatatccaccggggagaaatccatctcgccaaacgtagtaatccatttatcctgttttttacgtcccgcggcttttactacgccaaccggtgtctgcgctgctttccacggtcgcataaggtcaaatgctttggcaagatgcccttcccggccacggctacgtgggttataaaaacagataacaaaatcggcttgtgcggcggcaataatacgtttctcaatcatcggccacggcgttagcagatcacttaaactgatatgacaaaaatcgtgcatcaacggcgcgcctaataacgacgccgcagcaatactggcggtgatcccggcgaccaatttaacttcaagatcacactgttgctggcaaaccaattccagtactaagccggccatgccataaattcccgcatcaccactgctgatcaacgcgactttacggccggacaatgccagatcgatcgctttctggcagcgttcaatctctttgcacataccggtcttaatcacttctttatccatcgttagatgtttaactaaatgggtgtaggttttatagccgacaataatttccgcttcttggatcgctgcaatcgcgtcctgcgtcatcatggattcattgcctggtccaataccgattactgttaacatgattgtgatacccccaaagtgatagtgacgccctgctgacgcaaggtccgaccaaccaattttccttcactcatcaaccaagcgacaggctgcgaaacactgccaacccccaccgtctggcggacaaaatcggatgcaggaaaacgttgctcatgaagacttaattcattaacactgaacaactgaaacggtacacgccaacgttgtgctagctgatttagcgccggttcatcctttttaatcacaacactgccgatggcacgtaacgccatcagatcgaaatggttttccgccatctgctgctgcaatagctcaatcactgtttgcaatggcgtatcccggcgacaaccgatcccggccaccacacgcttcggcaccagtttgtaaaccggtagaggcaattccggcaatgcatctcgcaatgtgatacacaccagcgcatccagttctggcaattcttccagacacgctaccgagacaaaaccccggatatcacactgctcacgttcactaagcagtggttcatcccaccacaaccccactttttgaccactgaccagcatttgatttatcaccttcaccacgtggcgaaaatcctgcatatcggcatctaattgcgtggcaagggtgtccagcgccgccatgccattaacatcggtggcggttgtgatcaccggatcagcccccaataacgccgccaaatggtgagtcaatgcattagcgccacccacatgaccggataacaggctaataacatgctgacccccttcatcaatcaccaccacagcgggatcatgcatcttgtcatttataagtggcgcaagcaggcgtaccgtgatgcccagcgccgccaccaccaccaacgccgaatagtgtttaaatgcctcacgcaacgtgtcgccaaagctgccattaaaaggcgtaaaccccggctccagtaacttttcgctggtaaaacaggtcagaggaagatgagttttcaatcgatgtaccagtctgacccctcccggcgtcagacagaacaccgcaatcgattcatgcccggcgatattcatggctaaaccccgcatcataaagcttggaatagtggtactcctctcccaaaaaagcaccaaccagaatcaaagcggttttacgaatacccgctgtctgtactttttcagcgatatccgccaaagtaccccgcacggttaagctttcatcccaagtcgctttgtagatcaccgcgaccggcgtcgttgccggataaccaccagcttgaagacgcgcagccacatgtctcattttctgtacagaaagataaatcgccattgacgtttgatgagcagcgaaggattccagttgttcgagcggcggcactggcgtgcgcccttcaatccgggtaatgatcaagctttgcgccacttccggtacggtgtactccacccctaattgcgctgccgccccaaggaaagcactgacacccggtatcgagacaaaactgatacccgcttcggtcaaaacttcgccttgttcgcgtatggaaccgtacaatgagagatcgccggtttgcagccgcaccaccagcttacccgcacgtacaccatcaaccatcagtgcaacaatctgttccaacgtcaggccggcgctgtcatgacactcagcctccggcgggcaataatccagcagttcggtattaatcagtgaaccggcataaatcaccacctgcgcctgttgcagcaaacggtaacctttcagggtgattagctctttgtcacccggtccggccccgacaaaccacacttttcgaggatcaaaatattcagacatcgatcttctccttgtaacaggaaatcagataagtcggattattcggtttaaaatagtgacccgtacccaaggtcgccagagtagatgcttgtagctgtatgcactccaattgactgatctggcaggtccgcaaatgttccagtgcatcattcaggttattcagcaaaatgaaagtcagtaccaaacggccaccggggtacatgtgatccagtgcccaatcgatcaaggcagtcaattgcccaccactgccaccaataaatacggcatccgccatcacatccaacgctaacggcgcttctcctgcaataatctccacattatgacaaccgagtcgttgacgattctcctcaatcaaggccagtgccgccgggttgcgttcaatggcagtaacggtcagcgccgggaaacataacgccgcctccaatgccacactgcccgtacccgctcccacatcaatcaattggctagcaccattgagttccagccgctccagcgccaatgcacgtacaggttctttggtcattggcactttctgtccgcgtaaaaattcatcatctctcatttaggatcaccaccacattcatgtcatagtcaatcgccaccgcttccggccgcagacggtgaatacgctcattaggtaaagagaggttttcaccaataatcaatgtacggttcaggccgcgttcaataatggcctgcgcaattgcccgcggaccgacgcgcccatccgttaccatgcctactttgtcgtgttgcaaaagccagtcaaaatctggggtacgcccgtgactgctagtcagatagatatcgttcatatccagcgcagctttggcacacagatactgaattgaactgatacccggaatgatgcgcagatcatctgcggtaaaatattcagacaataatttgccaatgccatataacagcgggtcaccagacgctaataccacaatccgacgtgtactgttgttctgtagccaagcaagcaaaccagcaagatccgcatccagtacgcgggtttcgtgggtgatgccgctaaatatctccagatggcgtctaccaccaaccaatacctccgcctcagtgatagagtgctgtgcctgcggtatcagatacgcagtatcgccgggaccaattcccactacggtgatcatcgcattgcctccaaaatgtcatttaatgggcgactggtgccaagtatttgattatcaaaggagaacataatggcatcacagcgcggcgggttaaccgcaaaacgcaacatttcactcattcgttcacaaatgcgttcagcaatacggtcataaaccgcttgcaagccgtgttccgcaatcagttccattgcagcttccgtggtatcgcagtgactcacttccaacagtaattcctgcgacgcccccatcagtgccagataagcaatcaacgtttccatgcggccatcagcaatatgactgtgggtatggaaaatgccggcggccactttcaccagtttgccgggatgtcccaccaacatgatatggcggaacccaagccgcaccgcttcctgcaacatgtaacccacgaagttactcatggtgaccactagctgaccatcaagccctaattgttcacgcacaaaacgctcaccgtgattgcccggcaccagaatgaccttttctgcacccgccgaacgtttcatttccagctctatcgccaacgaacgtttccaactctcctccgacattggcgtgacgatgccagtagtaccaatgatggaaatgccgcccagtatccccaatcgcccgttgtaagttttctttgcccgctcttcaccttccggcgcgaaaatttccacctccgcgccccgtaaaggaccgatagcttcccgtactgcggcctcaatggtctgacgcggtgtacgattaatcgcagagctgcctaccggtaatcccacacctttacgggtaaccgtgccgacaccttccccgccccgcagatggatctcaccgtgatcgcacaaggtgacacgagcaaaaatcaacatgccatgagtggcatctacatcatcgccaccgtctttacggatagcggcggtcgcctgctgcccttcgatcaacggctgttcaacgttaaggcgtaatgtcacacccgaaggggtaacaatagaaacgtgatcgataacttgctgacgcagcaccattaatgcggcaaccttagcggcagcggtagcacaggaacccgtggtataacccttgcgatactgcttaccgttatgccagatgctgtctagttgcatggtgtcactcattgtgcctcctgcaatcggtacagaatggcattgataatcgccgccgcgatattacttccccctttacgacctgcggcggcgatacaaggcagttcactttgcatcaaagcggctttcgattccgccgcaccgacaaaaccgacaggcaccccaaccaccgccaacggtgaagccttcctttccagcagacggaacagggcggttggcgcgttaccgaacacgaagattttgtccccctcttccgccagtgcgacgtctaccgcggccatagagcgcgtgataccctgcgctttcgccatcgcaaccactcgcggatcactgatatagcagcggcattcacaccccatctgatgtaacagtgctttgttgataccggactgagccatcgtcgtatcggtatacaaggtgcatccccgacgtaatgcctctgtcatgcgggacagcacacccggcgagaaccataaaatatccaaccagtcaaaatctgcggtggtgtggatcacccgtttaatcaccgcttcttgcatctcatcaacaaaacgataatcggggcgctcactggcaataatatcgccaatgattgcgaagctattctgttcaatttgctgaggtttctggaggtaattcatattgttgcccttttttaagccatgccgaccaacagtaagcgcaacagcgcaaacaacagtaaggccagttgcgaagctatcatcatcaaatagatgctgagcgggatatccgtcagcgcaattttacggcgttcatcacccatccagggtttttctactcgttcaccaaaataacaactcggaccaccaaggcggatacccaacgctcccgcaaccgtcgcttccgaccagccacagttaggactggtatgctgataacgatcacgccagccaatacgcagtgcctgacgaaaatcaagccgaatgaaccaagccgccgcacttaacaacagccaactcagccgcgccggtaaccaattcgccagatcatccatgcgagcagaaacatacccaatggcgtgatattcctgagttttgtaccccaccattgaatcaagggtgttaatcgctttataagccattgccaacggcgcaccaccaatcatcaggaaaaacagtggcgcgataaccccatcaacgctgttttccgccaccgtctccacgactgcgcgcgtgatttgcggtgcatccagttgagaagtatcgcgcccgacaatccatgacaattgctggcgactctcatccaataagccctgttgtaatacgccatgtacctctagcgcggtatcactcagacaacggccagccaacagggtataaatcatccacacttcgaccagccagccgacccaaggatgaatggcgttcatcagccacaagcatccccaactcaccaaccaagtcagcccaacaaccactatccatagccctgctccaccgactttcaatgctcgttcactgtgacaacagcgccgaactgcccgctgtaccaaagagatcagcttaccaatccaacgcaccggatgaggccaatgcggcggatcacctaaccagctatcgagcaagaaagcagcaaaccaggcagcaagtgtcacaataacctcctcgcagacctcaaccagcgatcaagcagactaggacgctgagcaaaatggatatgaagataactagccagtgtctgctgtacctgatagcctccggcccattgctgtattgccatcccgtcacgccatttagtacagtcaaagactgaaggcactgagctgataaaatcagaataatgaaactcgtggccccgtaaaatctcaccttctgcggccagcaaagtgtcaaaacgggcctgtgcctgacagtaaccaaagcgcatcaaccgcgtacccatatggctttcccccggcagaataccggccatctggtgactcgccccttctccatcggtcaacgatttcccaaggtacatcaggccaccgcattcagcataaatgggaacttgacgacaatgcgcatcctgtaaagcttcccgcatggcactattggcggccaacttagcggcatatatttccgggtagcccccaccgagataaatcatctgacaatcgggtaaacggcgatcatgcagtggactaaaacggtgaatacggacccccacccgttccaacatctccagattatctgggtaataaaaattaaaggcttcatcatctgccaatgctagcgtcaagccatcagccaatgcgggatcaggcaatgatggtgcctcacccttgggtaaagtaggacaatcacaaagcgccaacagacgatcaagattgatatgcgcctccacctgctgagccaaccgttgccaacgagcatcattgtcagcctgctcttgagcaggaataaggccaagatgacgagacggtaatgacacatccttcatcacgggcaaacgccccagcaccggcacaccacaataatgttcaatcgcatgacgaataagttcgaaatgattttcagaattgacgcggttaacaatgacgcccgcaatcgttagagagggatcaaaacgacaaaaacccagaacagtggcggcaacagaggtcgatactgccttgccgtccaccaacaaaatcaccgggcatcccaactgcttagccattgcagcgctactgcaatagtttgggttggtaccataaccatcatacaaccccatcacaccttcaatgaccgcgacatcagcatgacgcatgtgctgattataaagaccattaagcgtcgcggttggcagcataaatgcatcaagattacgagatgctacgccacacaccgagctgtgccagccgctatccagataatccggccccactttaaacggctggacagtcaaccctctcaacatcaatgctcgcaaaatgccaagggtaaccgtagtcttaccacaaccactacccgtacccgcgataacaaatgccttcctacctgaccattgcatagaaaattcccgatatgtcgatcggaaaaggagcgccaataagacgtgccaacaccgcgcacaccacttggatgacaactcgcttcccaccgaaggagttaatgtctcgtgcctgtcaggtcggtcttctggcttagcgtcacccttccccgcaaccttcccagtctttccgaccagtggcatcagcggagttgtcagcatcacagcagcgggggctgcggaggactttcacctccttcccaaccacaccattaaggtgtggtattaacctaacggcggtttatacccgtcatctttcaagttgcctctttgttggctgcactctctcaccccggtcacatagtttgctatgctcccggggattcgctcccttgccgccgcgacgcatcttgaaatccatagggtctatttatttttaacgtggtctacttttcaagttattaattattagataactaatgatatatattcatttttaccataataaccttattaaattcattgaatttaaatgcagattaaatatatatttctcacaccaataaagcggctaattttattattttcggcgataaacttatgcgctttataacaaaaatcaccatcaatctggtgataaagatggtaacaacatagcaacagattaatcattgatcataatcaactatctattcatatcacataagcttatgatgtttcttatcataaaatcgctccttacatcatctgtataaccacaaatcacaatgagaactacctatgttattatatacctccatacctcgtattcttggcacctgtttttattactcaccgaaatcagaacaagtccgcccactaattccattgcttatcgatattgataaattatttccctagtcaaataaccgcaaaatagaaaatctgacaaaaaagctcgcgaccttctcagccgaatctctacaatatgacgactctatcttgttccaaggacaaggcgttatgccaacccaccttggggatcggtttatctggacagagaaaacgtgttatcaggtgcaagcacactggcttaccgggaatttctggcaaaacagaatattgtcatgtccagtgaacaacgggaacccgaagatcaattcagtctgatactgctggctttggtttacattttggaacaaggacataaacccgctgcacgtacattgttagaacagcacttactgccttgggcttaccattatctggaattgatgcagacaaccaaactagaaaatgatttttatcccattttagccactattgctattgactatttaaaaacactgcaaactgaattaaaactcattccggcaagactaaaattattttgctaacacttttattattccacaacaaatgctccgggtgataaatttagtaacaactaataaatatacattctcccggaattcaactcccatttaatcaactcatcctttataacaacgaatttataccagaaaaatctttataatccgtcctcgttccattgaacgttatagctctattgccgtatataaaactatttagctgatttttatgttatttattattggctatggataacaggcagccaatagaatgatcttatgcgctaaaaaaaccgtctattaattcataaattagtaaacattaaatactcatatagaggatttattaaatttctaaaaaaaacttagccataaactttatttcattgaatgtctgtttccattacatggaaagattaacaatgtaaacaacacgaggtaaaaatatgaagaaaatttttttagctacacttattacagggattgtatcagcaagtttttttgcacaagcacttcccgaaaataacagcgagcatattgctgatctgcaagacaataccagcaacgaagctccactattaaaatctaccgatccgggcgctgagcgatttaagcatgtcggaaaactgagcggtcgcggccaatgtaccgcgacacttattgccggttcagaaacccctgatgccaatcaacaagcacttattctttccgcgggccattgttttgattcttcattagataccaatgaagtcatcattgatcaacctgtaggcccaggttggacatacacgccaaactacttcattgacttaattaatgaacaccaacctgttgatgttgatagagttttatacgcaacaatgaaaggcggcgaccttgcggttttcagacttaaagcaacgtatggtgagttggcaaagcgcggaatactgccggtaaccttacaaaaagatcatgaaccatcggcattagaattaaccagccagcagattgaacttgctcatattccggtcaatggcatagagagtgataaacgttacctgcgctattcggcttgcaacattactggaaaagcttcgcttgtatatgaaggcatatgggcttggtctccggccgctgcggttaattgcgccggtgttgcaggaggaacttcgggttcaccggttatgttaaaagatcaatccaagataattggtgtattaaataccaccgtcgatcgaagttactggggttgcggtcttaaccggccttgtgaatttattatcgatcacagtttctcacgtacaggtgccagctattatatgcctattgataaaattgcacgtgcatttacttctgatggaaaactggatttaagtaaatttgatgatggcaaagggatcactattaacaccagcggcccattaattacaaagggtaccgttaacaacaaacctgtcacctggaatttacgccttgaagagaaaggttttgataatattcgctataaaagaggacttgcgagtaatgttgattgtaccgatcctaaaggatacagcaaacctgttccagtcacgacacaaccgctggaaaaacttaccgttccttccaaagaagggatatataccatgtgtgtcattgggcaacattctgcaaataaacgctggcagagtacatctaacgcatcaataaaactacgtgaaattgataacacccttccgggaataagaccggattcaacattactttttcaaacagatgatagctgggttatcgacctcagatttagaccttgggaagttgttgatatacgttataaagcaggcccaagaaaatcgacaaaatgcgatgattataaaaattactctacttatagaagagtaccgattacgattaaaaagaaagactctccaatacgcttttgtatgtatggcttagatcaagcaggcaacataggtgcaatattttttgaggactttggagaacaaaaataaatttttaaaatgggcctgcatttgcgctgagaaatccccacaaactcagcgctaataaatcaaaaccttatttcgatagattttggcaaaatggtttaatacattgtcgagagctatcactagtaaaattagcggagaatgtcgtaagatattctccaccataccgctgacaaacctcgttgaaaataacggggtttgtttcttttattatgaatcataatgccatccattttcctcattaacccgatgtaatcctccaccaaggcgttattttcgcctatcctgcaataaaatactcgctctcctgagataaaaacaacacagcattgcgaccagcaaggctatcttcttaatattttgggctatagataacaggacagccattattgtggcaatacaatggggcaactaattcgcggataaattcgaaatcaatagcggcatcgacttgacggactatacccgttatctttcaagttgcctctttgttggctgcactccctcaccccggtcacatagttatctatgctcccggggattcgctcccttgccgccgcgatgcatctcgaaatccatagggtataaatgatttttaggaaccagctcgtcaagcgagagtgtttctggcgggaaagtctggagagtgggtgttcttaacaaggtggcaagccccgtttagtgaacggaacttaattaaaacagagtgccggataaaaaaacagcactttgtcaataatctgatattatttcatcagaaaaatgttgttgcgcaatgatcgacacgtgttatgctgtctctcgtaacgcaacaggactcaaacaatgattaaaagttggaagcataaagggctacgaaagtattatgagaagggaaccacggcgggaattgttgcacaccacgctaacaggctagacctactgttaaacgcattagatttagcaagcggcctgaatgatttaagtttaccgagttttcaacttcacccacttacaggagatcgaaagagtatttgggcggtaagcgtatcgggtaactggaggttaactttcgaatttaacgatggtgatgtttatatactgaactacgaggactatcattaatgactaaacgtatgccaccccatccggggcgctatatctctgacgagatagagcacttaaatattagtcttagagcgcttgctcgtgcactggatgtctcaccgtcaactattgggcgtgttgttgaaggtagcgcggcagtaacgccaggaatggccgttcgtttagccaacgtgatcggcagtacgccggaaatgtggctgagactccaggaagcgtatagcttggcacaagttaaacaggaaatagatttaactcgtctcactcccctgtttacgccaataccttaacatggcggcaagctccgtctggtgaacggagctgaattaaaacagagcgccggataaaaaaaccagcactttgtcaataatctgacggagaatgtcgtaagatattctccgtaatatcaaataagaaataactcgtctcgatttaaggctatttgcctgatatctcaagttaaggccctttattttcagcattgtatactattaaccaaaggattatcgtactcagcgtggctaataaactcaggatgagtaagcgcccttctaagtgactataaaatccaaaaccaaaagcgccactttttcaccatgagagttctgctctatctgcattcggtgactgtaatgatgatagatacatcacaagttcttgagtgggtaaaacagaaataccctgctatcatggggaaagatagcaatcaataaacgagatcacgtggttccaaataagaagtgatttgccatttaaaacaggcggcaatagtggtgatggaggcagcaacgatatgtttgaaatcagagtaaaaaaacttaaagatgatctaaacctcatcaaaaccgatctcgcagttatgaaagctaactatgcaacaaaggaagatatcgcatctgtgagaattgaggttcaccaatctattgcaactcaaaccaaatggattgccgccacaatgttaggaataactggtctggcaattggtattgcaaagcttatcttctaaagacatatcacctattactcacccggtagggtggtttttcaaagacacacagtgaacaggcaaccgagaaaagaatggacacatacttcaacgcatttacgagtgggctgtggtgagttgataggattagtgatatatttcgagaatctacaataggttcatgagggaatgtgatgtattttgaaggctttggatggtatgtgtttatgtctcttttcgtatgcggttggatcactgtccccatcgggctaatatcttcctatgctgtgtataaatacaagaacccaataattaaaattatatgtacgttaatagcgttagcatttttaattcctgtaattgccgctttattgggttcgatgggattagttgaattttaaataataaacgaagttaaaaaccgacctcgcaaatacgctgaggggaatccccataaactcagcattaataaatcaaaaccttatttcgatagattttgtcgagatggtttaatacattatcgagaactatcactagtaaaattagcggagaatgtcgtaagacattctccgtaatatcaaataagaaataactcgtctcgacttaaggctatttgcctgatatctcaggtgaagccctttattttcagcattgtataccactagccaaaagattatcgtactcagcgtggctaataaactcaggacggatttttcagagcgtttgctgattttttcatttttactgacaaatatcaattcaattaaaacgtctcagttttttcaagtttaatatgataaacatcacctataccctatggatttcaagatgcatggcgacggcaagggagcgaatccccgggagcatagataacgatgtgaccggggtgagcgagtgcagccaacaaagaagcaacttgaaagatgacgggtatataatcatattaatacaacaaacatacagatgatgtttttataattgatggaattattttgaaattagataaaaccaatttgttattatttacataataaaccacatccgtaaaagatgcattcacaaacatttcatcaggatgtgcatttaaaaaaacaattcaacagataaaaatatgaattatataccctatggatttcaagatgcatcgcgacggcaagggagtgaatccccgggagcatagcaaactatgtgaccggggtgagcgagcgcagccaacaaagaggcaacttgaaggataacgggtatacttataattacgatatcaataacgtccaacaacacttgcttaagtacaaataaaataactctactgggatcagctcttaatatcctatggaagctatctgatgggtgaaaattgacccacaaaaatcacctaatgaggttccgaataatttcatcaaaggagtttattaatatgatcactttgaaaacgttaattggtacaactattgtgattctagcttcgtcaacacaattagctttagctgctgagacaaaagaaaacattaccgataaggaggcaacattagaagtttcagaaagtagaatttctaatttatcagccacatatgcactacaaattaaaaactcatcagcgacaaagagtattactcttgttacgcaatcatctaattgcatgtacgatagtggagatgaaaaaatacgcttagaggcaggtaaaacctatctgggaaatttacaggataataataactggatagatggatgtacaaatgaaactaaaactgtcgattggagtgttagttatattaatgttgccaataccgacacagaaaattatacactaacatttcggcatggtcgtggtcatgcaaattcagatggatctggccctgaatggtatacattgattaaagggtgtcctgatatagttgaaaatgctatttgcggaggacagatttgttataacagccaagcttattgggtaagaaatcgaagtgtaaatatagagctttccgttaaataaatttggatgtgttagttgaaactttatctaaaattgagagttacctgttttgatatggttaccaaatcccatacaagattacaggtaactctcagtttatttcgttataacaaatctccagaatcagaatacgcaaatcagaaaaaaatagtgactaatacagatcatagccaatctgtttccaccatgattgggaaaggcacgcattttgccaatatatgtgctctactttgaccatttttaggttattttatgaacaatagctgttcacaattaaaccatttgcaattctgttccccataatcgtcattttggtcatttattaacacacagatatacccagtttttaccctttcaatccccatttaatgccccagcacactgcttcaacacgatttattgttaatttataaattctataaaaccttggtttaacagaaaccgtcaatctggcgaaaaattcagcgcaacaaagctttgttgatgctaattttgcacgtggaaatgttgaaattgttaatactaagagcatatatccgcgaatcaatttcttcccaccattgggtaaagaatctcgtggattctttgcgattgaagcagatctgacaaatgataatacgcaatctatttatttatataagaggaatgtcgcgggtaataatatttatctcattaattttcctaataaaagcggtatattagcgacaattgatgatataactgcgccagtcggcgtcccacttccgtatccatcccgttatacacccgcaggctatcttacgtgtaatggtcaagcatttgataaatctagatacccccaactagccatagcttatccgtcaggaatactgccagatttacgcggtgaatttatccgtggttgggatgacagccgaggggtagatatgggacgcggaatgttgtcttggcagccagcagggattcaagatcatatgcactataaggtgatttcaaaacaagtcgttgaagaccttgtacttgcgggaaatcaatcgtggggaaccgagaaaaacagtacatatacacgttcactagatcaaaacatatcgactggcggagtaatcggaacaactgtaaatgaaacccgcccccgcaatattgcatttaactacatagtgagagcagcataatgacagaacaaaaatattctttagaaccggaaacggcaatcttaggtaaagatggattggcagaaaaagcgggctggctgacaatctaccatgcagcacctcattcaagggaatttatcggcgtgacaccagaatatctgatgaagggagttggcataccggccagttcctatacaaatgctccgacacttcctgactccgattctctggctgtcaggcgcacggcagacggagagcactgggaaattgtccccgattaccgtggaaaaacagcttacaacacacaaactcgcttaccgcaagaaattactgatctgggtgaactacccaaaaccctgacattcgaacaaccggctactcattttgatcgatgggatggctcaaagtgggtgactgacaaagtggcaataaaggatagtgagattgagcaggcagaacaactgcgcgacacgctgtgtacacaatctaatgaaaccattacgttgctacaatatgccgttgatactgaattggcttcggaagaggaacagacactgttacttgaatggaaaaagtatctggtattgctgaaccgtgttgatacttcattggcccctgatattaagtggcctgagatgccagaatgacaacaataagggctgcttatgcagcccaatgacaatcgaagtcagaaatctcacatgtcatttgaattgctaaaatttcggtgacgcattttttataaaggcagattagactaataagttaccgtcttgatggtcaagttctaatagcatagttttcatcatatggtattacttgtatttttctatattggggagttttagtgatgcttctatgttataggggccatttatattatgaataaagtattctgctttgcattgtagctaagatttattttgttcacatgatgaaaaatacatagtatagtactaatagaaaatctggatggatgaaaaaattgaatctccatttttcttgttttccgaaagctacattacgttttactactacacgatgttctattgatagataaatatgaaacttacaaaaaaccacctaatcaagctactacccgttgttgcactcttcatcttttgccttttagctcatatggctttaggttatcgcttaaaaatagcgtatgtattcgctatattctttatttttctattgctaaacaaggccacagtggtttataggcccctgcttatcattcttggtatagcaactctcgtttatgcccctatcgggcttacatacggatcaccaaacttaaattcaattctttcgttattctatacaaataaacaagaagctagtgagtttatctcttctattccagttgaatattatctctttagtgcgcttatcctgatctttngtttattatctctaanagtaaatgttaatttacatagaaatattagtgtttttctattttcttttgcattaattacagtaatacaccatcctttaaaatcttttatacagggtgaagagttcaatattctcgactctggacttcctgaaattagggctgtcaaagatgtcactatcaactttataagggtaaaaagcgaatatgaaaaaatgcaacaaatactcagtgaacatgatacgtggggaacggtgtcggcaaaatcaaaatatagcacttatattgttgtgattggagaaagtgtacgtagagattttatgaatgtgtatggatttccgatacataatacaccttttatgagcactgccaatgggacactttttacaaattatatctcagtaggtccatcaacccagatatcattggcaaactcactagcaatggtcaaagatggtaaaaatattttaagcaacaatattgttacattagcaaaaaaagcgggcttttatacctactggatatcaaatcaaggttctatggggatatttgatactccggttgccagcatgggagcaagggctgattctccattatttatcaaaaaaggtgaatctagttctggtcttaacagaaatattcctgacacagatataataccaattgtgaaaaaagccttagaggataagagagaaaagaagctaattgttatccatttaatgggttctcactccccctcttgtaccagaacaaattatgaatacaaggtattctttaagtcagaacaggtttcttgctatatacagagtattgaaaataccgatgacttgttatcaataattactgatgaagcacagaaaaatgagaagaattggtctttgatgtattttgctgatcacggagtttctttctttgagaaagatagtaagaagatgaggcttgctcataatgataaatataagcaagattatcaggttcctatgtttattacatcttacgatgatacgtcacgtaatattattaatgttcaacgcaattcaatgaatttcttaacactattttcagattggacaggtattaaagagtctacaatacctgagaattgtaaaatgttgtctaatgaaatatgtgaaaatcaagatgatgttctgaactttagtaataaggtcatgaaatatagctcattaccggaagataaaattcctgaatgaatttttatattatgagaaatataaataagatctatgttggttttgatttctagataaaattaactcatgacaaagataagagtaggtgagcaatgaatattatgataacaaatttccatacagggaatggcggcggtcataccacatatatcatgaatatagttaaatattttgattataataaaggaaagctgctgattgcttgtccacctgaaagcagattatacaaagaacttaccaattccggatttaataatgttattcctctttactttttctgcaagcttaataagctaaaacaactcgtaataacctgtaagattttatcacaaattgccagaagacaaaaaatagacataattcatactaatggaacttctgacaacaaaatcgctatcctcgcaaaaatacttttcgggatgaaatgcaaaataatctatacaaaacataatcattatcctgtatcttggttatccaaaatcaggctgaaaaaattcaatgaaagaattattttcgtaagtgattccactagaaatcaatgctcctcttttatctctgataaacaagttgttactataaaaaatggtattgatactgataaatggaaaactgaacatccagttatagaaaaaggaaaaataacacttatttcttctgctggaaccgctgaacacaaagggtggcattttttgataagatgcttggcaaaaaataaagagctatctgataaatttcgtataaaaattattggacgcattcctcgccaagaagatataaataaattagtgggtgctcttttctctcacgtcgatattgaatttactggttatattaatgatgataaagaaattattaattatatggaaaatgcttctatagggtttgttttatccactgattgtgaaactatcagttttgcttgcagagaaatgatggcttgcagtttacctgttattgtcagtgatttcgggggattaccagaaaatgttgatcatggtgtcaatggctggatcacaaaagcaagggatgaaacatcaatacataacgttttaaatttgattgctagtttatcatctcaggaattaaaagaattgtctgaaaaagctagagaaaaagcggttaatgagtttgatgtgagaaaaatggtttcagaaacgataagtacctatagttctgttcgtaattcttaaatctaaaaatttacggcctggagagcaggccgtcgttcattttattttggttgttcaggccagataatttctgatgctaatgaagtatcaatgcgattcagtgacactcgataccttttccattcgagtaataaggctttttccttattagttgctattcctaaatcaatagcatcctgcaaaggctgaattacctcatttgcagcaatcattttttctgacttctggttcttttcctgttgtcgttgttcttccaatgtataaatgcgcttgatgattttctcaccgtcaaaaaaccacccatctgtgataattatctcagttggtacatcttctggtgcaagttcagcaacggataaatggatagggaatagactagatatatcctttgatattgaagtgataacgccatctttattaaatgtgaatttgatagtttcttctaaaaatttttcttgaatctgataccagtcattaccttcatcatctcttaagtattgaacacaagatatggcatctttcggaatataaggcgtaaaaataccagttttcataatgtcaccctagatcgaggagattgttacccaaataccatttatgtatgcttgtacaggacgataatgtacactggcaaggtgctgtcttcctgaactccacattactgtacccaagccaacaaggacatgcccagaaggagcagaccaatcttttgtctcgtctgtccacccaccctctgttacccaacttccaagtcgtaaattaatcaccccaacatcgttcttcaaagcgtagcgattatcgcattcacctgtggtatatgcaccgagttctcccggagaaggtttattcattgaactatatacccgaacacctggagcctcatacactcctttaccggaaatatatccggttgcatccacattcccgtttacaataccaccagattttggatacgcccccacatccccggcaataggtttattctgtgtgttatattcttgtgcccaaggtgtccatcccggaccgctccacgggtataaagcccgtgtatatatccgactgctattatagacaaaataacgttgaatagtgccagcagcctgtaaaacaacaagagaaccagcggatgcttcggggtagtttttaccggctgtcgcttgtacatttaaaccctgataataaagccctggcgtttgataatcatttaaatcggctttgtcagggatcgatattgcttgcccattaaagatatcttgagaggtaatattgacatccccactcagcaccttgccattaactttccggctattcggcacggcacttttcgccagattgacggtttctgttaaaccaaggctttctgtagttcattaactgacagcaatctttgtcaaagcagcttttaaaggcattcaatgggactcaatatggtaaaaattgggcagatctgagtgtcaataaataaccaaaataatgattgagaaagaaacatattaaccgcgatggaattacgaacaataatcgggtgaaaaacatacagaaaaattagcctcactttgcgttttaacgcaagttcatttgagataaataaatttactttgtgtgtatgcgtgcatatgcttatgtcaggttgggaggatatgaaatcaaccaacctaataaaagagctgattgctgttggacgcgaacttagaaggagttaccaataaccggaaagacatactcggttccgcatcccaaaaaatatcagcctatcagtattgtcaaatctataaagaaaatggtgagagtttaatccccgtcgactttggaggtcatcatgtttttttcagtaggtgttgagttatcgaaaaatgaaaatacagcgtatggtttggtcattcctgcgctgtgtgccgaagattatggctgtttttctgccgcggataataaagaagacattgcgataatggcacgtgaggctatcttgttaacagtagaagatatggtcgcgaataatagcgcagttgaacatattcaggatgctggctatctggtttatgcaaaaaacgcagaatatcaatacattgataactggtttgttatcaacgttgatttatctgagttttccggaaagcagaggcatattaataatcgtgacaaagaaagtttggcacaatacgatgttgaataacaaaagaactttaaaagatgagctaaataaaaacactattttgcaaatcatagttatacaactcttaattgtgtctataatcataaaaaattatgcctgactttcttcacccatgaacgaacaaatacacgcaaaaacatcaaacgcaaagttgttaaaattttatgttttctttttgtatatctagctcgtttactgttgaatgaacttcatttcttatcgatgagttgcgggaatgctcagtgagatttataatgataaatattttcattatatttttattctgtgtaatttttacggtaatcaatataaacattataattacattgtgtaattaactttacatagtgaaaaatatactgattttttatacgggaaattttttcgttctactgtaaatctagattctgatagtttttttaattttgcgacaattaccaacctacaaaaaatcacattcttaactgtgtaaaactaaggctaattagatataacggcaaaaactcagcttaaaagctataaaaagattctggaagtgtgatagtacaggactgattctattagtgagcgagtaataatgttactaggtagagaacatttttcacagtaaatcttcaccttagtcattaattgatacaattaatgggaggaaagcagtataataccccatatcaatcatattgataatcaattaaatgtctttaaatttgacaattaggagcaggaatactgatgttggttcaattcacacatgtacttatatcagaatatatatttagtattgaaagctctttattgaataattctaaaggattcctgtaggtaactagcggattgtactattatgaataatgatgtattagtttcaattatcatcccggcctttaatgtcgaagatattatagaaaatgctattaatagtgttcttaatcagacatataaaaacactgagatcatcattgtcaacgatggatcaactgatggcacaatggatgttcttaaccggctgtctgaacaatacttcaatattgaggtgttttctcaagaaaacagagggatttccgcagcaagaaacgttggcttaagtaaagctaaaggggattatgtcactttcctagatagtgatgactcttttgagccttcgtttattgaatcagtgttgcgaaaaaatggtgagacaaagagtgatattactttttgtttgttcaagaatgtttatacagacaaagagatttgttctaaagattatcgagatttaaataatctggcattcaattttttgaattttgattattttggcatttgttgtatgttaataaaacgtaattttttgttagaaaataaaatttggtttgatgaaaacctaattgtaggagaagatatttcatttattttgttatgtatctgtaaagcgaagttttcttacatcccagaatatctttataattatatttaccgaagtgattccatcatgaataagaggtgggatgtaaagaattatatagatgaaatccaagcttgggacaagatttatcaagatatggacacgcaataccataacgaagatcgtgaaacctttatgagaaaagttaaatcaaaagctttaagcctaaaaggccagctaatgtggaaaatgctagcatccaaaagatttgatgagctttcttcttttttatccgatttttcttatcaaagacaagatgctgaatttattcggaagagaaataagtttttatttaggctgaaaataattaagtctaaaaataaaataatttggttgttggctaatttattactgactaaaagaaaagacagaatttaatttttagatagtcatgacaacaatctaaatggcctataaaaacaggccattttagactgttaataagctttatacttttgcattaaaaaattatcatcgtataaaattcatttaagaattttatcttctttcactggtcaattgtgtgcattttataatgcactttcctttggtgagaaaaatactgaaatataacaattacgtcttctattgaaaagtgcacaatttgaattacaggggcacaggatcggttatagctcattaattcacagcgattcttgataagtcagttttccaagatattcaataggaataaatacggtaaaatttaaccacacatggtagattcacataataagtgcaacatcgttaatctggaagtaaacatgttcgtattcctttaaataattcattcggggttttcccaccccgtgtttttcgagggcgattatttaatcggtttaccacaaaatttatttcctgatcagagacttcattaaaatccgttccctttggaaagtattgtctgatgagtccattgatattctcattgatccctctttcccaaggcgagtaagggtgagcaaagtaaatttgggtttctaattcttcaccgatgatttcatgatctgcgaactccaaaccgttatcgaacgtgatggtcttaaccctttgttttaacgggtataatactttcactgccgctttcgcgacttctgatgcctgcttgctatcaagtttaacgattattgtatacagcgtcttgcggtcaaccaatgttaataagacactttttttatctttccctattatcgtatctccttcccagtccccaatacgttcttttttatcaacaatttccgggcgttcatcaatactgacccgatttttaattttacctcttctttcatagcgaccatagcgtttgcgatagggttttctggctattcgcagatgttgccataaatcacccccctctcttttatcttgataaatcagtctataaatcgtctcatgatgcaaagatatccctttatgttgcttcaaataatcagccacctgttcagggcttaaatctttccaaattaaccgttttatccatctttttacttccggcgttattttcacggctttcttagcaaaatgacgacgcgccaataccttcaaatgagcctgttcagggcagtatgtctggacttcttgatttctcttcaattctctgctgatggtcgatgggcttcgtttaagtgactccgcaataaaaagctgtgaaaaacccgcttcttttaaactggaaatctggtatctttctgtttcggtcagttgtgtataggccatagtgcattttcctttggcgagaaagatgcctactatagcaactgaccgcccttctgaaaaattgcacttattagtcgaatccgcccatatatttaataactattttgtttactttatcctgttactatgatctattaacgcttggcatgttatgtgtattttcctatactgggggttatgatgatacttctgtgttatgtggtttcttttatattgcaagtaaagtattcgggtttaaatcgtaactaaaatttattttattcacatagcgaaaaatacatagtatagtactaatagaaaatctggatggatgaagaaattgaacctccgtttttcttgttttcgaaagctaaaccacgttttactattacacgatgtcctattgatagataaatatgaaacttacaaaaaaccacctaatcaagctattacccgttgttgcattcttcatcttttgccttttagctcatatggctttaggctatcgcttaaaaatagcgtatgtattcgctatattctttatttttctattgctaaacaaagtcactgtggtttacagacccctgcttatcgttcttggtgtagtaactctcgtttatgcccctatcgggcttacatatggctcaccaaacttcaactcaattctttcgttattctatacaaacgaacaagaagccagtgaatttatctcttctattccagttgaatattatctctttagtacgtttatcctgatctcttgtttgttctctctgaaagtaaaaattaatttacatagaaatattaacattgttctattctcttttgcattaattacggtaatacaccaccctttaaaggcttttatacagggtaaggaattcaatatccttgactctggacttcctgaaattagagcagtcaaagatgtcactatcaactttataagggtaaaaagtgaatataaaaaaatgcaacaaatactaagtgagaaggatacgtggggaacggtatcggcaaagccaaaatatatcacctacattgttgttcaaggtatatattatataagttctaattgtaaaactgggcccgctgatatcataaccaatgaagtaaattgcgagctatatcctgttgataaaccctctgaattaataagtaaattacagaatacagaatatagttaacgtaaaaaactatctgacagtgataaaataaaaatggcgatttcaaattatttgaaaagagtaaaatcagcacttgac

SEQ ID NO: 29 - DNA, 52811 bp, Photorhabdus luminescens
gccgttaaagagcgagcttcttcgcggtaatacgcagtttaaggataagtgagcatgattgtatatattccgtttattttgatggtcttgagtctgttgggatttcttgcctgcttcatctattttggcttgaacaaaaaagtttcactaagaagtgtaaaatctccgttgctcttttttgatttttgtttttttaataaaaacaaacttgctaatttttccatgataatattatttgctatttatatgtctggaattttgtttgaatttattaaaaattaatttcctttgctggttattttattggagtatttgcaattcttgtttttcttattcattgcagatttttctcaaaaagaaaatttgcacatagaaataatattgaattcataaaagagtttgtttttgaaatggaaataagccttcaaaatacgtcattatggttatctaggttattttatattgtttggctttatttgtttttttctacgtaattgttgtagacagtaatgcatttaatatgggaagtctgtttggttataaagaaggaggaactcagtttgatcttatggggcaaaggaccgatacatttactaatgaacgggctattcaaaaaaataggagaacaaaatggttatcttagttaacaataacaagattaatatcaatgggcacttaattatacttaatcgaaaaatcattaaagcgatagaaattgataatggttttgttcttgtcttaattgatattcctataggagatgatggactaaataatttattttcttatacaaagaacggagagtttctttggcaaatagagccttcgaatttacaaaaagaagggcaaacaagttacccatacgaagggttgaatgttgttgaagggcaatactttgttgttgatttttatggaagaagaatatttttcgatccttatactggtctattcttatcacgagatattgtaaaataagatatggataataacgcattagcgatcagtttgattcatacatgagctaatataggtatttaacatacttctaatggtagtattaatttcaattatgttgtttttgtgcattgggctggctcaagctatgtaaaatatgatggttaaaagagtgattgggtaaagtttttctttattatcagatggttgtgtcgtttttttatagatggaatatttcttttttcacttggagatgtaaataaaggttattaaaaaagggggtatttatcgggctaataagttatttttttatatactatcacctgtatgatttacgtaaattaataatcaatctttggattgaagttactattttgagaagttttatgaaatgtattaaatgtgaaaacccaacattacatgaatcagatttttgtgccgcatgtgaagaaaaagaactgagtagaattggcggatttctctatttcccggcaataaacattatctttgcaatattaagttctttatttagtgcatataaagcaatgacaatcctgatctctggttatgattttctaggtgaattacgtgtccttataggatttgagtttatacccgtcatctttcaagctgcctctttgttggctgcactcactcaccccggtcacatagttatctatgcgcccggggattcgttcccttgccgtcgcgatgcaacttgaaatccatagggtatatttgttttacccttatttttggagttgcactttatacatctgttcttttctttagaaaaaagaaaaaacacctttattttatattatccttttggtttttacttcattatttgtaataaccgatttaacattgtctcattatgtatatgagataaaactggattatagttatctcttcttgctttttaaaactgtgttttatgtatgtatatgggttccttattttattatatctatccgagttaaaagaacatttataaagtaatgattaaaatcaaactattttgcaaataatattcaataagagtaggtaagttttttgcaacccatatttattcaaaaaatatgacagtcaaaattaccccggccttgtgaattatttaaaaaagtcaggcaatttaaatcattcgttcattaaggtctgagtcctgtattttactgggctaagactatttaacccgaattctgcttaagccgtcattaaaatatctttctctgagtagaaaattttcagtgatggctttttcaatttaaggctgtaagcaatcaatccacctaaaacacacaacagaaagccttttatacttcggtggcgcgagtgctcaatttgagaaatggtctttaattgcccgttaatcgtttcgatgataaatctcttttttaacattaagttattccactcagacagcgcttgtgctttcatattacggcgtttcttcgtgatgaaagtcacaccgattttggctaaatcatcggccagttcctgactgagataacctttatcaccgtaaagataacccgttaacgattttgataattcgcgtacaggctctcgatcattcacattaccgggagtcacttttagcgcgagaatttcgccctgatggttaacaaccaagtgtaatttgaagccgtaaaaccagcccattgatgtttttccgcgctgggctattcccttaaaaaccttatgacgcgggatacggatgttatgacagacgcacaaactcgtggaatcaataaaagcaatcttggtcggttttccttttaattgagtcagataactacatagtgggaccaaaacggaaggggcaacactgacaaaacgggtataactgagcagggtggggaaatctttgtggtgatatttccaaatatgttccagataaaaatgtttaaaatcacggtaatgcgccatatgaaaaaggatcaaaatagtcatgatttcactggggtgcatatggccttgccgatgacgctggcggtaccctttttcgaaacaaaataattcccattgaggaatgaagaagcggcaaaaatcatcgacatcgcagaaaatttcaactaacttgttcatagcctgttcctccccggagctgtttcggcgtgcaccaaaacattgctcctggaacaggcttcatgtcaatttcttatccagaattcgggttatttaatctctacttgattcttaagcgtggacgaatgggagattacgatggcccacctatccagtgagccatttttaccattattgcttatccttatggcaagttaaatcaggcaaatttccccttgccaattgtggtatctgcccaagccgtggtaatagccattttctccctgttatccagcgcttcaataaaaccgttatcaccggctgttggggcaaaactgctcattgcctggattaaggtatcaaccgcattgtcggaaagtgccgtaaattcacgctctcctgatgcatccttacgccccatctgtgtcactaatttggcacggttaccattaaagtaatctctaaaggtgactgaacccaccgattcaaatagaccctgagccgttttatcctgagtagggcgattcactgataacaccagatcatatccactgcgctggaaccacaagtcttgccagtcaatatcgttaaaggcaatcatatcttctgcattaatatcatcaacctgactgtcaatcaccttaccactgaccacaaagctatctactcctgcccctccttggaagtggttctggtatccccccaacaccagtagatcctgaccctctccgccgtcaaactggctgaatttcgaaattgtagccgctatcaggtgatcatcaccttctccgccattaattaccgcatgatagcccatcaatttaatgacatcgttacccatgttgccatcaattcggttgtcattaccaaacacccggccaaagtcattgccttcacctagctcaacccggttgttattaccgatagtcacggcataatcttgatcttcgccagtatccacctggttgtagttaccagaagtgacaacgtagtcccgcccattaccggcatcaataacgccaccttcaccaaaaacaaatgtctgatcgttaccctcacccatgaatacatggttaatgcgtccagctaccactgcggtatcatcgccactaccgccaaacatccagttttcacgtcccatcagaacgcccaagtcatcaccttcaccaccggtaaagatgttggaagtgccgatggagtaataaacatcatctccgcggccaccccagaagttgttgttatcgcccagataagcaccgagatctttaccatcaccgccccagttgaagttatagtttcctaacgagatatggatatcgctgtccccttgcagatgaccactgttacgcaggaaatcaaacgttttctgctccatattgagcagatcggcggtgagattctctttcagattggtcacgagtgacttcatctcttgttgtttatctttgctgaatatcgtcgcaaacaggttaggcaaattcagcgaattaaagcccaatgcccgctctgatttgtcatcagcctgactcttcccactgttgacggcatccggtacactcttttcccgattttcatcaggcgctttctctttcagcccatgactgacaaaaaatgactcaataccatcggcactcatattagcgttctgtttcaaaccctcaatcaatttatccggatcagtgaagacacttagttgatcaccaccaaactgcttaatcacttccaacatctctcgcaaaatagccttaccatcaaccggctcaccagtacgggcaacaatctgtccctccggcgtataatccacaccaaaaatatccgctaacgtggtctctgcattcacaccggctaaccgacccagcagtttgtttttaagctgacgcggtaagtcctgtaggttgtaagtaaaggttgttttcgccaagcccgttgttgaatattgctgcgtcatcagaccaaacaacgaacccagattggtatccaaaatcgattgaatatggtcaccgaacataaagttccagctaccggttgtgacctgaatgtccgccccttgaccacctaccgcaaaattgaaagccagtttctcattggcttgacggaatttatccacacgactcatcttcttggtatcaatattgttgccgtgaccatttaaccattggtggtattttttgtttaatgccgcttctgtgtcgcttttcaaaccccggctactgcgcttgagctgcgaatccagatcaaccaatgtcttgtaatccacactactggtttggtctaaacccgacatgtcacgcacaaattttttcgcgcccgatagcgtccactgctgattttgcgccgccaaccagttccgctcttcgccggaatgagcaatagatttcagtacaccggtaatacgcgcagcgccatcaaatggattaactaacggtggcgtagggatggatttatccatcatgacaatcaggtcattactgcgaccttggttgaagctgacgttacggttgccaatgaacatctgcgccccttcaagtgcttgataacctgccagattaacgctgtgcttactgtcaccctccccgatgtgaaccatcacattgttgtcgccaaaggccagtgatttaaagccacccgtacccactttaataccgacgttcgaggttccccagttaatcgcagtaaattcaccgtcgcccacgtttacctgtatattcccggcgtaacctagcggctccgactgaggatttgaaccaagctcaaccctgtttttgcgctttcctggcgcagtgaaaacatcatggttatccgcaattgcccctctggttgctgaatcagcttctgtgtgccccactttggcaaggttgatatcactttcagccacccctcgacgcaatttttctgtcgtcgtcgtgagttcatcctgttcattccagcgtaacaccagtttgttatcgtccaacttgttaacccactgatgatttttatcgcgagtaaacttacgacctgttgcatcaacggccacttcactgcgacgagctgaaacctcactacggataccttgtttatctaaagcggtaataaaacgataggcaaaaccattccgcttatcatcactaatcagtgaacaacccacgatgctgatacgatcaggtttacctgcctgctcaaagttctggctgaactgttttagttttattgccaattcatcagcactgtaaccactcaggcgagtgttattttgtgccgattcgttacggccatgccccacaatctgccaacgtaatttgcctgataaaccggcaggatcaccataaatgacatgatatttgccattagaatcaagtttaaccaccacactggatttccggtgtttactcgccagattgagcgcggcttttgcgacaatcgggtcattttccatttgaataatgatctgaccatcaaaacgtgttccacgattgtcactcttttgccacgagttcttcactccatcccgatttttattttgaaaatcggagagcgtcgagacaatcctatcagtatattggctcattaaagcaccgctctcgacatgaccataaaaggtttgttcacccgatacgcgataaccagaagcggccaatcttgcacgcagcttttccccttcatgccccaaaccttgattgtcagttaacagcatgatcggcgtattgatcggcagacctttgaggtttttttctactgaaaattgtccgttcatcgcttttgccaatgccccaatcatgccaccagggtttggtacgtcatgcgcggttatggttttggtcatactcgatattggcctgtcgagtaacagacctgacacggcttgattattttgcgacgcatatcgagcaagatctgccgccaccggtccaccaacggaataaccatgaagaataatattacccggcttaatgccgcgatcttgcaccaaatagcgaaacatcgtccgggcatcctgatagaacccttgttcaccgggactaccatcactacccccatagccgcgcatgttgacagcaagtatatcaatgccctgcttttgataatggctttggatatcatgagcttgctcttccgcggataaacctgaaccatgaaggaaaagcacgacttttttctctgccgccgtcgagatatcatctggttttatgtcaccttgatgataatatccggttaaacgtccctcttcgccttttagggtgattttgctggatttaccattagcaaccgcatcattaagtatcgtctgcgttttatcactgatatgacggcgatcttctttaaaaccatacagttcgttgttaaaaaatcgggtcactgggtttaaagagtctttatcccgtggcggagtatcatcattttcaattaataccgactctgacgcgccatttttgcccgataacgcctgtaatgcttctaccggagagtcgttctgttctctctcaggggtattttctcgataaaggtgttgggttttctcaaatgcgttatttagtgcctgatttatcgataatttccctttatctccggcgatatccatcagatccatataactggcggtgtagttttgtagtacttgccgacgttcatcaccggtcatctgcaatgctttatagaccaccaaactttcattaaccgaatgaccgccatcaaacaccagaaacgccaacgtattaaggtaggcctgctcttgcgagaaagtaggatcttgactggcaatatagttattgagatgaaccatgatattggtcgagcccgatgcccccgtcaccacggaatgcccctgcgccaaggcgttacgctcaagcgttgtttcctgtccgggcgtcagcactctgcccgccgctacctttctgccatacaggaaatctccatactgatcaccagatggttggtagggcagtgcaataccataatcattggtttgctgttcagttaacttcactttataggtaacatccgccatattcgttaatttactactggtggaacgcgccttgtagatctcctcccgatagaaaatgtccgcttccgccttccattgagataaatgtaaccccataccatccgtgttcgacatttttaccgccagaaacggaatcttgatcatttcaaaaccgttatccaccttagtcatcatgatcttaaagttatccaaggtcggtttttgcaggaatgcggtcagttcaggcactcgactgaaccagggacgaatatcttttttaattttttcggcaaaagcttgcatcctgatatcaatctgtccgtcgagtacgggtgagtcagcagtactttgcatatacagctcaaactcctgcaccagaaactgacctatccgcctggaggtggctagcgcatccggtgacgccatttttaccaacgtatgggccacttcggaatcaaaacgacgaccaaataagttgtcaatatattgggtagttgacttttctctgtgagcatcagcctgtaatgacagtaccaaaccatgtaactcagggtatgcctgtaactgactggcagcatcatcaaataacttgatagtttccttcgaggtgacttgtccggtgagccagagtcccctggcccgtccaatcaaaaacctcgcttccgggatattcgcggtttccaatcggctcataaaagcaatcagactttcactttcggtcttaggcgcttcccgttcagcggttgaattcgttcgggtcaacggggtaatctgccattcaataagacgattaatttcgttttgtgttataccgccttttaaaccgacaacacgtccggttccatcaaagatgacgcgttgcgtaagatgttcagcatgttgaggtgccacggcgatcccaaggacgccagcggattcagctcgctgagcctgtaagtgctctatcattcggcccattttaaaacgtactaagttcacctgattggtgcgtagagcaaactcctttgggctatgctgttgccaatcagctatcgcccgttcaagcagcaatatatgctcttcatcgaaatggctcatcgtcttatagaaagtatcgcgtaccgtggccagcgccgtgctaagcttcctttttcgccccaatgttcgcacattgggattgataaatagcttgtttccctctttcaataaattaaattttgcattttcaaatatagcggaatttttctgctctaccttgacatcattccccaacgatttcagattaatgcctgaaatccgcggcactcttctgacacgctcacctgaactgttcgacgttggtatcaccctatcgtcagattgtcctttggcaaactttgaagtcgttaaaacgccggtattttccacgcgaatactggcatttatctgtagacgatcaaccgcttgtttagcatcatccaacgcttgtagctcttcttcggtcaatcctttgtagaattttttttcagcttccggtattaattcgggatcaatatagctaccggtttcccccgcgcctgtcgattcatagccattaccagacaaaccactaccaccggcaccggtacgatcaggttttgaatcgctctgttttgcccctctaacatcttcttgtacctgggcaattttattttcagccgcagcaatatcacgtttaccccgatattccgccccctgataggcgatatttgcatcattttccgccttttcggcccgttgttgttgcaataatgcttcttcttttcttaattctgcttttttctgagccgctgcaatatcttgttttgcactggcatgatgctgttcactttgtgctacgccgacctcggatttcttcaccgcttcttttacgtgttgttggttatccgtaatagcttgtcgggcatgcattaattttcgctgcgcaataaatttgatgtcattcaacttatcctgagcgtggtccaggaattggctagcaaattgattacgccattggtcacctgattggccgctgtaattggcatagtcaccaagcgcatccaaaccttgcgtcatagaaaccagtttgtcagtctccgcctgcgcttctgcttctattgcattacgctgtgtcagcccattttggctaactgctgcctgatcggttaattccaactgggattgcgatttcgcaatctccgccagttgtttctctttttcctgttccaacagtcggcgatctttttctgctttttctttatcgcttaacgcattttgcgccgctttatcctgtttcacatgttcggtaataatattggcttgttgtgagctcttagattttgcaataacgttatccagaatatagccgacaccatcactcaagcctgttcctttaaactcaatgcggttactgcccgcttttgctgtcagctctagtgttttattttgccatttcgcggcatcgccaaaagtcgagaatacaagtttgtcgttccagaaaacatccataccattgtcgactgaataagcatcgggacgattagcaaaatcaaagctcagcgaaatcacttctccctcagaacggttttgtagatcctggtaaatagtagtgtttttatcaacatcaagttcactgactcgttcgccataacgggtattattaggcccatcagtactcactgagctataggccgcaatatcattggttgattgccaatccaatttaccttgctcaaggtcattattgacaatcagtgacgtttcagatttcacaatgatattgtctaagatgtaactaaatccatcatcctgacctgtacctttaaattcaatccggttagtccctgcttttgccattaaatcgagtttttgagtgcgccatatagctcgcggtccagaagttgagaatacagacttaccattccacaataccattattccgctgccactcagatcacggtccaccctctcaaaatgactcataaaatcaaaagtcagtgaaaccacttctccttcagacaaattttgtaattcctgccaaattacggtgtttttatcaacatcaaatttactgactcgttcaccatcaccggtattatcaagaccataatcactcgctgggttatatgcctctataccatgagttgactgccaacccagctcaccttgttcaaaatcaccattgacgatcagattttcatcttgatctgacaccgatagcgttttttgactcaaagcaccttctattgaactgacgtcaggcgtctccaccgctgttatagcaccattgaaactatggtttaaatctgaacttatcggcgcaatttcatccatctgaaagccatcaataccagatacttccgctaaattaatcgcccctctgcctttgtgggtgcccgacgtgttagcttcctccccatgaaccaaatagttgattgcctgactgcctcccacacctaatgttgtctgtttgatatgctcaaagagggaagaaagtttgttgctattcgttacagagaagctgtagaaatcaccattaccaatcttaaccgccacattattacgtgcgtaggaagcattgatgcccagaccatcacccacatggatattggcattagcttggcctttcatgaccgccacattcaggccattgcccactttggtattaatattgtgcttaccccacgccaggttaaccgaaacgccattacctacgtgagtgtttatattcgcgtcaccatgagcagcggtgacatttaagccattgcccacagttgtcgttacgttagctttcccttttgccaccgtcacctgcataccgtctcccactttggtgacaatattgccttcgctccataaggcattaaagctgtctccctgacctacctgagtgacaatgttagccttgcctttcgccagcactacattacgcccgtcaccgattttagtgatgacattggctttgccccaggcaccggtgtaatcatcaccgttacccacatgggtaatgatattggcatccccctgcaccaccgtgacttcctgtcccttccccactttggtcatcaggttggctttacctttcgcgaaattataacggtcgccattccccacttgggtcaggatattcgcttccccccaagccgcattcaccccggcaccatcgccaattttggtgataagattggctttacctttggcaaaccccactgtcgtaccctcgccgacatgggtcatcacgttacccacatcggaaataagcaggccaactgtggtaccgtcgcccactttggtcagaatattgcctttgccaaacaggatagcggcagtcgtcgcatcaccgacatgcgtaataacgttcgctttcgccgccgcaacaacccccataaaatcatcacccactttggtgacgatattggcctcacccagtgccaagacccccgttaagccatcccccacatgggtcatcatattggctttaccaaacatggccgccagcgttgtgccattaccgactttggtcatcacgttcagttcaccggcaaacaaaccaatactggtgccattgcccacatgcgaatagatattggctttccctaccattaaggcagcggtcaggtcgttaccgactttggtcagcacattagccccgccaatcatggccgcaaaggtattgccctccccgacatgggtaaaaatattggctttgccgatcatcgccgccaacgtcatgccattacccactttcgtggcgatattgccctttgccagcatcagcgcaacactggtgccatccccaatatgcgtaaacacattacctgcggcgaccatcaatgccagcgcatcaccgtcacccactttggtaaaaatattacccactccccccattaatgcccatgcatcccctttgccgacatgagtaaacaggttacccgcgccaatcatggccgcaattgatgtaccctccccgactttagtgaagatgttccctgctgcggccatcacgcccagtgtcaaaccgtcgccgacatgggtcaacacgttgccaacaccaaacatgatgccggtcatgtcaccctttccaactttggtcaagatattcgcgccacccagcataacgcccgtggtattgccgtccccgatatgcgtaaggacatttgccccgccgcccatgaccgcctgcgtatggcctttccctttcttggtaaagatgttggctccgcccaacgcaatggcggtggtgttggtagtttcagtctcatcactgagatgagtgataatattggcaccgccaagcataccggcaaccatatctcccgcaccgagctttgttagcacgttagcgccacccaaaaatacggagaagatatcccctgttccggcctgagtgatgacgttaaaaccgcccgccccgaaccagttcgcgctaccatcacctatttgggtatgagtgttatatccccccaacatcagtacccggctgtcaccgttacctttgtggatcgagatattgccataggacagaaggtgggccagatatcgtccatccccgacccgtacgagaacattgaccgcaccaccagcgtaaacatccattttcccgcgctggctctggtgaaccaagacattggctaaacccgcaccacgaaatgatagatcgccctcttcaccgtttttcacaatgacgttagcacctccgcctccttcaaaatacgtattaccgaatgttgaactgtgcagaataatgttagccgctcccgctcctgtgaaattaatattaccgtgcgtcacattggatgtaataatgttgccaccaccagcaccgatgaaataaatattaccggaactatcaccgccattctttgatgatttgataacatcttgctcagaataaccttcaatatcagtcagacaatcagtaatctcatctgttacatttaaatcatagtgaagctgacttaatgtataaccagccccaattgattgataaccgcgaggataggaaaaacgttcatttgctaaacggccagtatggtcaccttttttataccaagatcttgcaatatatttcagctttcctgtttcatcatcattcgccagcttaacctcaaccactttggtataaggctccagaaatattgcatatacataagtatccggctgctggtttgatttcaccggagagacatcgattttcagcccattagacgagatcgcgtatccccccattttggcactacccagtgtgacgtttttcgctttaatgttagtaccatcggaataattcacccatttatcggttaataatacctcctcaacaccctgtactatggtttcttgtcgatataccacattaatattggcaagcgtaatagcatcgtcccctttaacggagataaatccattatttacgtcgatattttccttagcaatatccttaagatggttaccttccttataccaggaagtggcataataacggagcttaccggtatcaggattattttgcagccgtacagcgacaactttagtattaacattatcggcaatggcaaagagataagtatcaggctctacctcggatttaactgctttaacttgttgagattgttgaatcccgcgctcttccattgttgctgatgtcatcacaatatctttagcctgagcaaattctatttcatttctcgctcctgctcgggtaatttcgttataagctcctgcgccagtaaaatgaatattaccgtgagcaacatcagaatagagtttgttataaccccccgcaccttcaagagtaatatcaccctgtgtctgtccatactgatcttcactgtggcgtgtacgttcaatgcgattcgctgcccccgcaccatgcaagataatgttaccttctctacccttacgtacaatatgattatcagcaccaacaccattcaaagtgatatcaccgctttctatccgcgaatcgatactatttgcagcgcccgcgccgttaaatgtcacatctccttgagtaccctcataataattagaccaggtacggtcaattttattagccgctcctgcgccagcaaaataaacatttccctgatcagtttcatgccataattgattgtatccaccagcccctttaaaacgggtatctccagatgaacctttacgaaccagtttgttatagccagcagcacccgaataagataaatccccggtttcacccgtatgatcaataaaagccgtaccggctgcgccagaaaatgacaagccgccatttcctgttttactaataccggtataacctgaggcaccctttaccgaaagttcaccattcgtatggtatacatcgaccttaaatgaaccaatcgtaacatcatcatctccgccataagcataaacttcaccaccaataccaatagcaataatactattaccgtcattatcgtcgtaatatttcccagtaaagaagtactctgtacttctattcgatgattttcccatcaatagccctttaatttattattgaagttaagcagaaagccactgcacctaacaaatagggcagttattttgaatattcaagttctcacgaaacagtgaaatcttctgaatttttaatagcaaaaaatcaaataaagaaaaaaaccgctattaaaattaacatcagatattgtttgcacgaatttatcaaacatattttttacaaaaagtaatttattaataaaataaatataaaaaagaaaatattaagttcagaaaagtttcaatttaatgcatttataaacaccttaaaacaaatccatcgaatgagatataccctatggatttcgagatgcatcgcgacggcaagggaacaaatccccgggagcatagataactatgtgaccggggcagccaacaaagaggcaacttgaaagataacgggtataaataaaaaattcaaaaagagcgttaacacagatatttttttccgcgataatattgaaaatacagagaagagaataaagtaacgactaagctaagatataaaatttcatcaattacgatcaattattttattccatttccataaatatccacacagattatagctattaaaataatataagtaaactaaataataatatcctacttttttagtcaggaaataataataataacaaatgaaattaatcattagattcacataatgagtatttgttattcagcggtaaaaaaaagctcacctattctgtgagccttttttattactcattttaacttttattcttgagaactaattacgcaaactgcactttgcctctcgtggtatctgcccacgctgttgccatgacgattttcgtctgactcgccagattgtcaataaaaccattatcccccacagtgggtgcaaaactgctcattgcctggattaaggtatcaactgcattatccgacagcgcagtaaactcacgctctcccaaggcattcttatcccccatccgcatcaccagtttggcacggttaccattaaagtaatcactaaaggtgactgaacctattgattcaaagataccctgcgcggttttatcctgtgtaggacggtttactgataacaccagatcatatccactgcgctggaaccacaaatctttccagtcaatatcgttaaaggcaatcatatcttccgcattgatatcatcaacctgactgtcaatcacctggccactgaccacaaagctgtctacccctgcaccaccctggaaatggttctgataaccgcccagcactagcagatcctgaccctctccgccatcaaactggctgaacttcgaaatagtggccgctatcaggtggtcaccaccttctccgccattaattaccgcatgataacccatcagtttaataacatcgtcacccgtgttgccatcaattcgattgtcattaccaaacacccaaccaaagtcatggcctgcccccaattcaacccagttgttattaccgatggtcacggcataatcctgatcttcgccggtctccacccggttgtagtttcccgcagtcacaacataatcatacccgctaccggcatcaatcagcccgccttcaccaaaaacaaatgtctggtcattaccttcacccataaaagcatagttaatccgcccggctattaccgcggtatcatccccatgaccgccaaacatccagttctcacgtcccatcagaacgcccagatcattgccttcccccccggtaaagaggttagctgtgccgatggagtaataaacatcatctccgtaccctccccagaagttgttgttatcgcccagataagcaccgagatctttaccttcaccgccccagttgaagttatagttccccaacgagatatggatatcaccgtcccctcgcaggtggccgctgttaagcaggaaatcaaaggtttttccctccatattaagtagatccgcagtaagattctcttttagattggtcacgagtgacttcatctcttgttgtttatctttactgaacatcgtcgcaaacaagttaggcaaattcagcgaattaaaaccccatatccgctctggtttgttatccgcctgactattcccggtgttgatgtcgcccggtacgctttcttcccgatgttcatctggcgctttctctttcagcctatgactgacaagaaatgattcaataccatcagcactcatatcaatgttctgtttcaacccctcaatccatttatccggatcagcgaaaacatggaattgatcccccccaaactgcctaatcacttccagcatctctcgcaaaatcgcctggccatcaaccggctcgccggtacgggcaacaattcggccttttggggtataatccacgccaaaaatatccgccagcgtggtctctgcatttacaccggctaatcgccccagcagtctgtttttaagctgacgcggtaaatcctggggcttataggtaaatgtggtcttcgccatacccgttgttgaatattgctgcgtcatcaggccaaacaacgaacccaagttggtatccagaatcgactgaatatggtcaccgaacataaagttccagctaccggttgtgacctgaatgtccgccccttgaccacctaccgcaaaattgaaaatcagcttctcattggcccgacggaatttatccacacggctcattttattggtctcagtatcattgccgttattacttagccattggtagtactttttgttcaatgctgtttccatgtcactgttcaaaccccggctactgcgctcgtgctgcgcatccagatcaaccaacgtcttgtaatccacactgctggtttggtctaaacccgacatgttccacaaaaactttctcactcccgatatcgtccactgctgatcctgtgccgctaaccagttccactctgtgccggaacgagcaatagacttcagtacaccggtaatacgcgccgggccgtcaaatggattaaccagcagtggcgtagcgatagatttatccatcatgacaatcaagtcattactgcgtccctggttgaagctgatgttacgagtaccaataaacatttgcgccccttcaagcgcttgataaccggcaatctcgacgctgtgttcactgtcaccctccccgatgtgcgccatcacattgctgtcaccaaaaaccagtgacttaaagccgccggtacccactttgatccctacgttggaggttccccagttgatcgcggtaaactcgccatcgcccacatttatctgcatattcccggcgtaactcagcggcttacccaattgaggatttgaacccggctctatcctatttctgggcttccttggcgcagtgaacgcatcatggttatccgcaattgcccctctagtgactaaatccgctgccgtgtaccccacccgggcaaggttgatatcgctttctgctaccccacaacgttccagctctgttgtcgtcgcgagttctccctcttcattccagtacaacacccgtttgttatccttcaatttgttaacccactgatgatgtttatcgcgggcaaatttacggcctgttgcatcaacggccacgtcactacgatgcgctgaaacttcgctacggataccctgtttatctaaagcgataataaaacggtgggcaaaaccatgctgcttatcctcactgatcagtgaacagcccacgatgctgatgcgctcaggttcacctgccggcgcaaagtcctgactgaactgtttgagttttattgccaattcatcagcacggtaaccactcagacgagtgttattttgtgccgattcgtcgcggccatgccccacaatttgccaacgcaacttgccagataattcggcaggatcaccataaatgacatgatatttgccatccgcatccagtttaaccaccacgctggaatctgggtgcttacccgccagattaattgcggctgttgctacaatcgggtcattttccatctgaataatgagctgaccatcaaaacgggtcccatgattgtcactcttttgcctagagctcttcaccacattattaagtatcgtctgcgtctcatcactgatatagctgcgatcttctttaaaactataccgttcgctgttagataattggggtgctgggtttaaagcagttttatcccgtggcaaagtgctctcatcctcaatgaatactgactctgacgcgccatgtttatctggtaacgcctgcgatgccaccgtcggagagttgttccgttctctcttaggggaatatttccgataaaggtccagggttttctcaaatgcactatttaatgcctgatttatccattgttcccccttatcttcggcaatatccatcaggtccatataactggcggtgtaatgttgcagtacctgccgacgctcatcacccatcgcctgtaacgctttgtagaccgtcaaactctcattaaccgaatggccgccatcaaacaccagaaacgccaacgtattaaggtacgcctgttcccgcgagaaggtaggatcttgacgggcaatatcgttattgaggtgaaccatgatattggttgagcccgatgcccccgccaccactgaatgcccttgcgccagagcgttacgttcaagcgcggtttcccgtccgggcatcagcaccctgcctgccgtcacatttctgccaaataggaaattttcatacggatcaccggatggctggtggggcaatgcaataccataatcattggtttgctgctgagttaactccactgtgtgggtcacattagcataatgcgttaatgtattactggtcgaacgggccttgtagatctcttcctgatagaaagtatccgcttccgctttccattgagataaatgtaaccccatcccgtctgtgatcgacatttttaccgccagaaacggaattttgatcatttcaaacccgttatccaccttagtcatcatgatcttaaagttatccaaggtcggttcttgcaggaatgtgatcagttctggtgtctgactgaaccaggggcggatatcctgtttaattttttcggcaaaaacttgcatcctgaaagcaatctgtgcatcgcgaatagttgagccagcagtattttgcatatgcagctcaaactcctgcaccagaaactgacctatccgtctggaggtggctagcgcatccggtggcgcggttttcaccaacgtatgggccacttcggaatcaaaacgacggccaaataggttgtcaatatattgggtagtcgacttttctttataagcatcagcctgtaatgacagaaccaaagcatgtaactcagggtagccctgtaactggctgacggcgtcattaaataacttgatagtttcttccgatgtgacttgtccggtgagccagagttgtctggcgcgtccaatcaaaggcagcactgccgggatattggcagtttccaattgactcataaaagcaatcagactttcactctcagtcttcggcgcttcccgttcagcggttgaattcgttcgagtcaagggggtaattttccactcaataagctgattaatttcgtcttgggtgacaccgctttttaaaccaactacccgaccggttccatcaaagatgacgcgttgagtaaattgttccgcaaaccgaggtgccacggcaatcccaaacacccctacggctccagcgcgctgagcctgtaagtacgccattatccggtccatcctaaggcgtattaagttcacttcactgacgtatagagcgaattcctttgggctattctgttgccagtcagctatcgcctgttcaaaccgcaatacatgttcttcatcgaaatgactcatcgttttatagaaagtatcacgtacaacagtcagaactgcactacgcggccttttccatcccaatatttgtactttgggattgataaatagttgattgccctcttttaataaattaaattttgcactttcaaatattgcggaatttccctgctgttctaccttggtatcattccctaacgatttcaggttaatacctgaaatttgcggctctattatgacaaactcatctgaacggttcgatgccggcatcacactatcgtcagattgtccttcggccaacgctgaagccattaaaacgccggtattttctgcatgaataccagccattatctgtagatgctcaaccgcttgttcagcactctccagcgcctgtagctcttcttcggtcaactctttgtagaattttttttcagcttccggcacgaattcgggatcaatatggctaccggtttcccccgcgcctgtcgattcgtaggctttgcccgctaaaccgctccccttggcaccggcacgatcaggtctggcatcgctctgttttgctactttggcatcgatttgtacttgagcaatcttattttcagccgccgcaatatcacgtttcccccgatcttgctcctcctgataagcgatattggcatcattttccgcttcttgggcccgctgctgctgcaataatacctcttcttttcttaacgccgctttctgctgagctgctgcaatatcttgtttcgcaccggcatggtgctgctcactttgtgctacgccgacctcagatttcgcaaccgctttttcgatttgttgctggttatccgcaataacctgtcgggaataagctaatcttttctgtgcaataaatttggcgtaattcgactcatcttgaatatagctcaagaacttggcagcaaacggattgcgccacgggtcgcctgattgaccactgtaacctgcatggtcatcaagctccaccaaaccttgcgtcatggaaaccaatttgtcggcctcggcctgcgcttctgcttctatcgcattccgctgtgccagcccacttcgattcagcgctgcctgatccgttgattccaattgggattgcgatttcgcaatcgctgccagttgccgctttttttcctgctccaacaattgactatcttttcccgctttttctttatcgcttaacgcattttgcgccgcctcatcctctcttacatgttcgataatcacatcggtttgtagcggtttctcagattttgcaataacgttatccagaatataacccatgccatcattctcaccggttcctttaaactcaatgcgattactgcctgcctgtgcaattaattctaacgttttagttttccactctatcgaatttccaataactgagaatacccgttctccattccaaacaacttccatgccattttgaataacatcgatatcggaacgatgagcaaaatcaaaactcagtgaaatcacctcgccttcagacaaattacgcagatcctgataaatcgtggtgtttccctccacatcaagttcactgacacgtttaccatgaccggtattatcaagaccataattactcgctggaccatatacctctatattattggtaaactgccaacccaacttaccttgttcaaaatcaccattaataatcagattattattctgctctaatatcgatcgcgttttttgatttaaagcactttctattacatccacatcaggcatctctacccctgttacagcactattgagacgataatttaagtctgaatttaccggagaagttacatccatctggaagccatcaatagcggaaacttctgctaaatgaatcgcgcccctgcctctatgggtactaagcgtgttaacatcctccccctgcaccagatagtcgatcgcctgactgccccccacgccgagtaccatttgtttgatattgttgtagagagcggctagtttgttgctttctgtattactcgcggcaaccgccaggctgtaaaaatcccccccgcctatcttaatcgccgcattattgcgcgcataagcggcattcacatataaaccattccccacctgaatattcgcattaccctgacctttcatgaccgccacattcaggccatggcccactttggtattaacgttatatttcccccacgccacgttaaccgaaatgccatcacccacatgagtgttaatgttagcatcgccctgcgcggcagtgacatttaaaccgttgcctattgtcgtggtgacgttagctttccctttcgccaccgtcacctgcataccgtctcccactttggtgaccacattgccttcactccataaggcattaaagctgtttccctcaccgacctgagtgatgatgttggccttacctttcgccaacaccacattacgcccgtcacccactttagtgacaacgttggcttcgccccaggcgccggtgtaatcatcgccgttccccacatgggtgataatgttggcatcgccctgcaccaccgtgacttcctgtcccttccccactttggtcacgatgtttgcctgacctttcgcaaaggtgtaacggtcgccatttcccacctgagtcaggatattcgcctccccccacgccgcattcactccggtgccatcgccaattttggtgataagattagcgttaccgctaacaaatcctacagtcaaaccatcgccgatatgggtcatcacgttacccacatcggaaataagcagaccaattgtggtaccgtctcctactttggtcagcatattgcctttgcccaacaggattccggcggttgtcgcatcgccgatatgtgtaatcacattcgcttttgccgctgtaacaacccccataaaatcatcgcccactttggtgacaatattagcttcacccagtgctaacacgccggttaagccattccccacatgcgtcatgatattagcccgaccaaacatggccgccagcgttgtgcctttaccgactttggtcatcacattcagttcaccggcaaacaaaccgatactggcgccattaccctcgtgggtaaaaatattggctttccccatcattacggcggcggtctggtcatgaccgactttggtcagcacattggccccaccaatcatgactgtaaaggtattgccatccccgacatggctaaagagattggccaagccaatcatcgccgccaacgtcgtgccatcacccactttcgtggcgatattgccttttgccagcatcagcgcaacacttgaaccctccccaatatgcgtaaatacattgcccgcggctgccattaatgccagcgcgtcaccgtcacccactttggtaaaaatattccccaatccccccattaacccccaggcatcccctttgccgatatgggtaaacaggctgcccgcaccaatcagagccgcaatcactgtcccgtccccaactttggtgaagatattgcctgccgaagccatcacacccagtgcaaaaccgtcaccgacatgggtcagcacgttacctatgccgaacatgacaccggtcatgtctccctttccgactttagtcaaggtattagcgccacccagcatcacccccgtggtcttgccttcaccaatatgcgtaaagacgttcttaccgccccccatgatcgctaatgcatggcctttccctttcctggtaaaaacgttggctcctcccagtgcaatgatggaggtgttggcggtttcactctcctcactgagatgggtgataatattggtgccgccaagcataccggcaaccagattacccgtcccgagtttagtaatcgcgctagcaccgcccaaaagtacggaaacgatattcccagcacctttttgagtaatgaagttaaaaccgcccatcccaaaccagttcgcactaccattacctatctgagtatgcgtgttgtatccacccagcatccgtacccgactgtcaccgttgcctttgtggattgaaatattgccataggccaacagatgagccaggtattgcccatccccgatccgcaccagaacatttaccgcgccaccagcgtaaacatccattttcccgttctggccctggtgaaccacaacattagctaaaccggcaccacggaatgtcagatcccctttttcgccgttttttacaattacgttagcggtacccgcaccttcaaaacgaatatcaccgaatgttgaactgtgcaaaataacgttagcggccccggctcctgtgaaataaatattaccgtgcatcacgttggacataataacgttcccaccccctgcaccattaaaataaatatcaccggagctatcaccactactttctgatgatgtcataaggtcttccccgacatcattattaagatcagtcaaacaatcagtaatatcctctgttacatttaacttatagtgaagctgacttaacgtataacccgcttttattgattgataaccttgagaataggaaaaagtttcattcgctatgcggtcagtatagtcaccttttttataccaggatcttgcaatatatatcagtctccctgtctgactatcattcatcagctcaatttcaaccaccttggtataaggctcctgaaatactgcatacacataatgattcggatgaatgtttgatttaaccgcagagacatcgattttcaacccatgagaagagagtgcgtcctcttctatttccattttggcgctagccagtgtgatatcttccgctttaatgttgacctcacgggcataatgtatccatctatcgacaaataatctatctacaacaccctgtattgtggttttttgttgatatatcacgtcaatattggcaagcataatagcatcgttccttttaatggtaacaaatccattatttacattgatattttccctggcaatattcttaagatggtcgccttttttataccaagacgtggcataataactgagcttaccggtattcggattattttgtagccgcacagcgacaactttagtattaacattattagcaatggcaaagagataagtatcaggctctaccgcggatttaaccgcttcaactcgctgggattgttgaatccagcttccttccattgttgccgatgtcatcacaatgtcttgagcctgagcaaattctatttcatttttcacacctgatcgggtaattttgttataagcgcctgcaccagcaaaatgaatatttccgtgggcaacatcagaatagagggtgttatatccccccgccccttcaaaagtaatatcgccctgtgtctgtacatacttacctttaccgcgtatacgttcaatgcgattcgatgcccccgcccccccgtaagacaatattaccgcttctacctttacgcacgatatgattatcagcgccaacaccctgaaaaatgatgtcaccgctttctacccgtgaattgatgctgtttgccgcgccggcaccatcaaaaaccacattcccctgtgaacctgaataacgattaaaccaagtacggtcaatgtcattgtatgcccctgcaccagcaaaacctaaatttccctggttagtctcatgccataactgattatatccaccggcccctttaaaaccgatatcacccgacacccccttacgaaccagtttgttatagccagcagcacccatataagataaatccccggtttcacctatgtgatcaatgaaagttgcaccagctaccccctcaaatgacagtctgccatttcccgtcttactaataccggtataacctgatgccccttttaccgaaaggtcaccatctgtatggtatacatcgactttaaatgaaccaatcgtaacatcatcatccccgccaaaagcataaacatcaccaccaacaccaatagcagcaatcctattaccgttattattgtcgtagtgttttcctgtaaagaggaactctgcacttatattatttaatgatttacccataaatagtcctttaatttattatttgggttaaacagaaaatcactgtaactatatctaatggagaaaaccgttttttaatatttaagttctcatgaaacaatgaaataccctgatttttaatggagaaattttaaataaataaaaaacgctattaaaattaatatcaaatattacttacacgaatttatcaggcatactttccctaaaaggagtttattaataaaatggttgtaataagaaaaacacccagttcagaaagattgttaacgaaaatatttaaaatacagaaaggataataaagtaacgcctaaactaagacataaatcctcatcaattattttgttctatctccgtaaacaaccacacggattataaccattaaaagaatgaaagcaaataaaacaataacatcttacttttttacaaaaaaaactataacgaacaaaacaattaaacaattaaataattaaataattaaataattaattaaataattatcacttagaaaactataatggacatctattactccaaggccagatctaacatttttaatatggttattatgggtaaaaacaacctttttagcgctcaataaacatacaaaagagatatcaaaacctatccataaaatcatattgaatatgtgaaattatcaacatccgtgtggcgattaattttttatacaaagcagaatcccgccctgtccgttacttagcattaaaaaagacccatcgaatcggtgagccttttttattattcattttaacttttatttttgcgaattaattacgcaaactgcaccttaccctcagtggtatctgcccacgccgttgccatgacgattttcgcctgactcgccagattgtcaataaaaccattatcccccacagtgggtgcaaaactgctcattgcctggattaaggtatcaactgcattatccgacagcgcagtaaactcacgctctcccaaggcattcttatcccccatccgcatcaccagtttggcacggttaccattaaagtaatcactaaaggtgactgaacctattgattcaaagataccctgcgcggttttatcctgtgtaggacggtttactgataacaccagatcatatccactgcgctggaaccacaaatcttgccagtcaatatcgttaaaggcaatcatatcttccgcattgatatcatcaacctgactgtcaatcacctggccactgaccacaaagctgtctacccctgcaccaccctggaaatggttctgataaccgcccagcactagcagatcctgaccctctccgccatcaaactggctgaacttcgaaatagtggccgctatcaggtggtcatcaccttctccgccattaattaccgcatgataacccatcagtttaataacatcgtcacccgtgttgccatcaattcgattgtcattaccaaacacccaaccaaagtcatggcctgcccccaattcaacccagttgttattaccgatggtcacggcataatcctgatcttcgccggtctccacccggttgtagtttcccgcagtcacaacataatcatacccgctaccggcatcaatcagcccgccttcaccaaaaacaaatgtctggtcattaccttcacccataaaagcatagttaatccgcccggctattaccgcggtatcatccccatgaccgccaaacatccagttttcacgccccatcaggacacccagatcattgccttccccgccagtaaagaggttggaaataccgatggcgtaataaacatcctctccacgtcccccccagaagttgttgttatcgcccagataagcaccgagatctttaccgtcaccgccccagttgaagttatagttccctaacgagatatggatatcgccatcatcatgcaaatgaccactgttacgcaggaaatcaaacgttttctgctccatattgagcagatcggcggtgagattctctttcagattggtcactaatgacctcatctcttcttgtttatttctgttaaatatcgtcgcaaacaggttaggtaagttcagcgaatgaaagcccaatgcccgctctggtttgttatcaacctgactattcccactgttgataacacccggcacactttcttcccgattttcatcaggcgctttctctttcagcccatgactgataagaaatgatttaataccatcagcacccatatcgatgtgctgtttcaacccctcaatccatttatccggatcagcgaagacacggaattgatcccccccaaactgcttaatcatttccagcatctctcgcaaaatcgccgtgccatcaaccggctcgccagtacgggcaacaatctgcccttccggcgtgcaatccacaccaaaaatatccgctaatgtggtctctgcattcacactggctaaccgacccaacagtttgtttttaagctggcgcggtaagtcctggggcttgtaggtaaaggttgtcttcgctatacccgttgctgaatattgctgcgtcatcaggccaaacaacgaacctaggttggtatccagaatcgattgaatatggtcaccgaacataaagttccagctaccagttgtgacctgaatgtccgcccctcgaccacctactgcaaaattgaaaatcagtttttcattggcctgacggaatttatccacacggctcattttactggtatcaatatcattgctgttatcactcaaccatcggtggtattttttgttcaatgctgtttctgtgtcacttttcaaaccccggctactgcgctcgtgctgcgcatccagatcaaccaatgtcttgtaatccacactactggtttggtctaaacccgacatgtcacgcacaaatttttccgcacccgataacgtccactgctgatcctgcaccgctaaccagttctgctcttcaccagaacgagcaatagactttagtacaccggaaatacgcgcagtaccatcaaatggattaaccagcggtggtgtagagagggatttatccatcatgacaatcaggtcattactgcgcccttggttgaaactgatgttacgagtaccaataaacacctgcgccccttcgaaagcctgataaccacccagattaacactgtgcttactgtcaccctccccaatgtgcgccatcacattgttgtcaccaaaagccagtgacttaaagccgcccgtacccactttgataccgacgttcgaggttccccagttgatcgcggtaaattcaccatcacccacgtttacctgtatattcccggcgtaactcagcggcttatccgattgaggatttgaaccgggctctatcctgtttttgcgcttccttggcgcgatgaaaacatcatggttatccgcaattgcccctctggttactgaatcagcttccgtgtaccccacccgggcaaggttgatatcgctttcagccaccccacaacgctccctctctgttgtggccgtgagttccccctcttcattccagcacaacacctgtttgttatcgtccaatctgttaacccactgataatttttatcacgggtaaatttacgacctgttgcatcaacagccacgtcacttcggcgtactgaaacctcgctacggataccctgtttatctaaagcaaacataaaacggtaggcaaaaccattctgcttatcatcacttatcagtgaacaacccacgatgctgatacgctcaggtttacctgcctgctcaaagtcctgactgaactgttttagtttgattgccaattcatcagcacggtaaccactcaggcgcgtattattttgtgtcgattcgtcgcggccatgccccacaatttgccaacgcaacttgcctgacaatccggcaggatcaccatcaatgacatgatatttgccatccgcatccaatttaaccaccacgctggaatccgggtgtttacccgccagattgatcgcggcttttgccacgatcgggtcatcttccatctgaataatgatctggccatcaaaacgcgtcccacgattgtcattcttttgctgcgaattcttcaccctatcctgatttttatcttctttaaaaccatatagttcgttgttaaagaatcgggtcactgggtttaaagcggctttatcctgcggtgaagtaccaccatccttaatgaatagcgactctgacgttccatttttgcccgataacgcctgtaatgcttctaccggaacatcgttccgttttctctcaggggtattttctcgataaaagtgcagagttttctcaaatgcgctatttaatgcctgatttatccatcgttctcccttatctccggcaatatccatcagatccatataactggcagtgtagtgttgtagtacctgccgacgctcatcactggtcgcctgcaacgctttgtaaaccaccaaactctcattaaccgaatggccgccatcaaacaccaaaaacgccaacgtattaaggtatgcctgctcctgcgagaaagtgggatcttgacgggcaatatagttattgaggtgaaccatgatattagtcgagcccgatgcccccgttaccacagaatgcccttgcgccagagcgttacgttcaagcacggtttcctgtccgggcgtcagcacactgcctgccgccacctttctgccagacaggaaatcgtcatactgatcaccagatggctggtagggcagtgcaataccataatcgttggtttgctggtcaattaattccactgtgtgggtcacatcagcacgatgagttaatgtattactggtcgaacgggccttatagatctcacctcgatagaaaatatccgcttccgccttccattgagataaatgtaaccccataccatccgtgttcgacatttttaccgccagaaacggaattttgatcatttcaaacccgttatccaccttagtcatcatgatcttaaagttatccaaggtcggtttttgcaagaatgtagtcagttctggcacccggctgaaccaggggcggatatcctttttaattttttcggcaaaagcgtgcatcctgatagccatctgcccgttagtaatctgtccgtcgcggatagttgagctagcagtattttgcatatacaactcaaactcctgcaccagaaactgacctatccgcttggagacggctatcgcatccggtgacgcggttttcaccaacgtatgggccacttcagaatcaaaacgacggccaaataagttatcaatatattgggtagtcgacttttttttgtgagcatcagcctgtaatgacagtaccaaagcctgtagctccgggtatgcctgtagctggctggcagcatcattaaataacttgatagtttccttcgaggtgacttgcccgatgagccagagtcccctggcctgttcaatcaaaggcatcgcttccgggatatttgcggcttccaaccggctcataaaagcaatcagactttcactttcggtcttaggcgcttcccgttcagcggttgaattcgctcgggtcaagggggtaattttccactcaataagatgattaatttcgtcttgggtgacacttccttttaaaccgaccacccggccggttccatcaaagatgacgcgttgactaagttgttcagcacgctgaggcgacacggcaatcccaagcacctttgcggattcggcacgctgggcctgcaagtactccattacccggcccatcctaaaacgtattaagttcacttgattggcgcgtagagcaaattcctttgggctatgctgttgccagtcagctatcacctgttcaaactgcaatacatgttcctcatcgaaatgactcatcgttttatagaaaatatcacgtacagcagtcatcgcttgactaagcggccttttctgccctaatgttcgttcatcagggttgataaacagcttactgccctctttcaataaattaaattttgcactttcaaatattgcggaatttcccttctgtcctagcttgatatcatcccccaacgatttcagattaatgcctgaaattcgcggcactcttctgacaaattcacctggactgttcgacgctggcatcaccatactgccagattgccctttagcaaattttgaagcagttaaaacgccggtattttccgcatgaatactggcatttatctttagatgatcaaccaattgttcaacactatccagcgcctgtagctcttcttcgctcagcccctcgtagaattttttttcagcttccggcaccaattcgggatcaatatggctaccggtttctcccgcgcctgtcgattcgtaggctttgcccgataaaccactccccccagcaccggtacgatcaggtcgggaatcgctctgttttgctactttggcatcgacttgtacttgagtaatcttactttcagccaccgcaatatcatgtttaccccgatattccgccccctgataggcaatatttgcgtcattttccgcttctttggcttgctgttgctgcaataccgcctctatttttcttaattctgctttttcctgagccgctgcaatatcttgttttgcactgacacaatgctgctcactttgtgctacgccggcttccgctttcgcaactgcttttttgacttgttgttggttatccgcaatagcctgtcgggcattagctaattttttctgtgcaataaatttgacgtaatacaactcattttgaacatggttcaagaactcggccgcaaacggattgcgccacgggtcacctgattggccgctgtaactagcatggttatcaagcaccgccaaaccttgcgtcatggaaatcaatttgccagtctccgcctgcgcttctgcttctatcgcattgcgttgtgtcagcccattttggctaactgctgcctgatccgttaattccaactgggattgcgatttcgcaattcctgccagttgtttctcttgttcctgttccaacagttggcgatctttttccgctttttctttatcgtttaatgcattttgcgccgctttatcctgtttcgcgtgttcggtaaccacatcggtttgtagtgggttctcagattttgcaacaacgttatccagaacatagcctacaccatcattcaaaccggttcctttaaactcaatgcggttgctgcctgcccgtgcaattaattccagcgttttacttttccactctattgcattgccagaagctgagaatacccattgtccattccagaaaacttccatgccattgttgataacataggtattggaacgatgagcaaaatcaaaactcagtgaaatcacttctccttcagacaagttttgcagatcctggtaaatcgtggtgtttctctccgcatcaagttcactgacgcgttctccatgaccggcaataacaagaccataagcactcgctgaaccatacgcctctataccatgagttgactgccagcccagcttaccctgttcaaaatcaccattaataatcagattattattctgatctgatatcgatcgcgttttttgatttaaaacactttctattacatccacatcaggcgtctctaccgcggtcacagtaccattgagacgataatttaagtctgaacttaccggcgcaattgcctccatctggaagccatcaatagtagaaacttctgctaaatgaatcgcccctctgcctttatgaatgccaaacgtgttaacttcctccccctgcaccagatagttgatcgcctgactgcccatcacaccgagtaccgtttgtttgatattgttgaagaaagcggccagtttgttgctttccgtattactcgcggcaaccgccaggctgtaaaaatcaccctcacctatcttaatcgccacattattgcgcgcataagaggcattaaccgctaaaccatgacccacctgaatattggcgttactctggcctttcatgaccgccacattcaggccattgcccactttggtattaatattgtgcttaccccacgccaggttaaccgaaacgccattacctacgtgagtgtttatattagagtcaccatgagcagcggtgacatttaagccattgcctacggttgtcgttacgttagctttcccttttgccaccgtcacctgcataccgtctcccactttggtgacaatattgccttcgctccataaggcattaaagctgtctccctgacctacctgagtaattatgttggccttacctttcgccagcaccacattgcgcccgtcaccgactttagtgacaacattggctttgccccaggcaccggtgtaatcgtcaccgttacccacatgggtgataatgttggcatccccctgaactaccgtgacttcctgtcccttccccactttggtcatcaggttggcttgacctttcgcgaaattataacggtcgccattccccacttgggtcaggatattcgcttccccccaagccgcattcaccccggcaccatcgccaattttggtgataagattggcttttcctttggcaaaccccaccgttgagccttctccaatatgggtcatcacgttacccacatcggaaacaagcaggccgactgtagtaccgtcgcccactttggtcagaatattgcctttgccaaacaggatactggcggttaccgcattgccgacatgcgtaataacgttcgccttcaccgtggcaacaacccccataaaatcattacccaccttagtaacgatattagcctcacccagtgctaacacgccggttaaaccatcccccacatgagtcattatattagcccgaccaaacatggccgccagcgttgtcccctcacccactttggtcatgacattcagttcaccggcaaacaaaccgatactggggccattacccacatgggaatagatattggctttccctatcattaaagcggctgtctggtcgttaccgactttggtcagcacattggccccgccaatcagggccgcaaaggtattgccctccccgacatgggtaaaaatattggctttgccgatcatcgccgccaacgtcataccattacccactttcgtggcgatattgccttctgcctgcatcagcgcaacactggtgccatccccaatatgcgtaaacacattgcccgccgcgaccatcaatgccagcgcatcaccgtcacccactttggtaaagacgttcactgcaccgcccattagcgcccagacatcccctttgccgatatgggtaaacaggttgccagtaccagtcaaggctgcgatagatgtcccctccccaactttagtgaagatattgcctgccgcagccatcacgcccagcgtcaaaccgtcgccgacatgggtcaacacgttgcctatgccgaacataatgccggtcgagtcgccactcccgactttagtcaagatattcgcgccacccagcataacgcccgtggtattgccgtccccgatatgcgtaaggacatttgccccgccgcccatgaccgcctgcgcatggcctgtcccttttttagtcaggatactggcaccgcccaacgctattgctgtggtatttgacgtttcagtctcctcactgagatggctgataatattggcaccgccaagcataccggcaaccagactgcccgccccgagcttagtcagtgcgttagcgccacctaacagtacggaggagatgctcccttttcccgcttgagtgataacgttaaaaccgcccttccctgaccagtttccatcaccattacctatctgagtatgcgtgttatatccgcccagcatccgcacccggctgctaccgttgcctttgtggattgagatattgccataagccagcagatgagccaggtattgcccatccccgatacgcacaagaacatttaccgcgccaccggcgtaaacatccattttcccactctgaccccggtgaaccagaacattggctaaacccgtgccacggaatgtcagatcgcccttttcacctttttttacaatcacgttggcggcacccgcaccgtcaaaatgcgtatcaccgaactttgagtcgtgcaaaataacgttcgctgcccccaaccctgtgaaattaatatctccccgcgtgacatcagatttaataatgtttccgccccctgcgccgctaaaataaatattaccggaactatcaccgccactctttgatgatttgataacatcttgctcaaaatagcttttaagatcagtcaaacaatcagtaatatcatctgttacatttaacttatagtgaagctcacttaccgtataaccagctcttattaatcgataaccataaggataggaaaaagtttcatttgctatgcggccagtatggtcaccttttttataccaagatcttgcaatatacttcagcctccctgtttcactatcattcgccagcttaacctcaaccactttggtataagggtccaggaatattgcatacacataagtattcggctgcgtgtttgatttaaccggagagacatcgattttcagcccattagaagaaagtgtgtcccctcctattttggcactagccagtatgacatcttccgctttaatattgatcccacgggcataattcccccatttatcggttaataatgccttcacaacaccctgtattgtgtttttttgtcgatataccacattaatattggcaagcgtaatagtatcgtcccctttaacggggataaatccattatttgtattgatattttccttagcaatatcctcaagatgatcaccttgcttataccaagaagtggcataataacggagcttaccggtatcaggattatttcgcagccgtacagcgacaactttagtattaatattattggcaatggcaaagagataagtatcaggctctaccgcggatttaaccgctttaacttgccgagattgttgagtcccatctccctccattgttgccgatgtcatgataatatctttagcctgagcaaattctatttcgtttctcacacctactcgggcaattttgttataaacccccgtaccggtaaaatgaatattaccgtgagcaacatcagaatagagtgtgttatatccccccgcaccttcaagagtaatatcaccctgtgtctgtccatacttatcttcactgtggcgtatacgctcaatgcgattcgctgcacctacaccacgcaagagaatatcaccgtttctacctctacgcacaatatgattatcagtaccaataccatgcaaaatgatgtcaccgctttctacccgcgaattgatgttgtttgtcacgcctgcgccattaaatatcacatttccctgtgaatcttgataacgattaaaccaggtacggtcaatgttattgcctgcccctgcgccggcaaaatctaaatctccccggttagtttcatgccataactgattgtatccaccgccgcctttaaaactgctatcaccagataaacccttacgaaccagtttattataaccggccacacccgaataatttaaatttcccgtttcacccgtgtgattaataaaaaccgcaccggctgcccctgcaaatgacagcccgccatttcccgttttatgaataccggtgtaacctgaagccccctttaccgcaaggtcgccatctgtatggtatacatcgactttaaatgaaccaacggtaacatcatcatctccgccataagcataaacgttaccaccaataccaatagcagtaatactattatcgatattatcatcgtcgtcgtagtattttcccgtaaatatgtactctgtacttctatttgatgatttacccataaatagtcctttaatttattatttgggttaaacagaaaaccacggcacctaacggatgtacccgttattgagaatatttaagttctcatgaaatagtgaaatcttctgatttttaatagcaaaaaaattaaataaataaataaataaataaataaataaacaaccattaaaattaacatcagatattgtttgcacgaatttatcagacatactcttttccaaaaagtaatttactaataaaatggatataacaaggaaaacgccaaattcagaaagattattatcgcagatctctttctgcgataatattgaaaatacagagaagataatagagtaacaattaaactaagatataaaggctcgtcaattatttattccatctccgtaaataaccatgcagattataaccatcaaaacagtacaagtaaataaaataataacaccttacttttttggcaatgaaattataaccaataaaacttattaataaaaataattcttgaacagtgaactataatataatgaatatctattaccccgcagtaaaaaaggctcaccgattctgtgagccttttttattattcattttaacttttatttttgcgaattaattacgcaaactgcaccttacccacagtggtatctgcccacgccgttgccatgactattttctcctgactcgccagattgtcaataaagccattatctcccacggtgggcgcaaaactgctcattgcctggattagggtatcaaccgcattatccgacagcgcagtaaactcccgctcccccgaggcattcttatcccccatctgcaccaccagtttggctcggttaccattaaagtaatcactaaaggtgactgaccctgttgattcaaagacgccctgcgcagttttatcctcaatatgacggtttactgataacaccagatcatatccactgcgctggaaccacaggttttgccagtcaatatcgttaaaaacaatcatatcttccgcattgatatcatcaacctgactgtcaatgacctgaccactgaccacaaagctgtctactcctgcgcccccccggaagtcgttctggtatccccccagcaccagcagatcctgaccttcaccgccgtcaaactggctgaatttcgacattgtggccgctatcaggtggtcatcaccttctccgccattaattaccgcatgatagcccatcagtttaataacatcgtcacccgcgttaccgtcaatctggttgtcattaccaaacacccgaccaaagtcatggccttcacccagctcaacccggttgttattcccgatggtcacggcataatcctgaccttccccggtctccacccggttgtagttgccggaggtaacaacgtagtcgtccccgttaccggcatcaatcagcccgccttcaccaaaaacaaatgtctggtcattcccttcacccatgaacgcatagttaatccgcccggctattaccgcggtatcatcgccatgaccgccaaacatcccgttttcacgccccatcaggacgcccagatcattgccttcacccccggtaaagaggttggaagtaccgatggcgtaataaacatcctctccgcgaccaccccagaagttgttgttatcacccagataagcgccgagatctttaccgtcaccgccccagttgaagttatagttccccagcgagatatggatatcgccatccccttgcaaatgaccgctgttacgcaggaaatcaaatgttttctgctccatattgagcagatccgcggtgagattctctttcagatgcgtgactaaggagtgcatttctgtctgcttatcttgactgaacatcgttgcaaacagattaggcagattcagagagttaaaaccaaatacaggttttgctttatcatcggcctgagcacttattccattgatgctgactggcaattctgatccacggttttcatccggggctctctcttgcagaccatgactttcagcaaacgatctgatgccatccccgcccatcgccatgcccgctttcaaaccatcaagcaacttctccggatttgtaaacgctttcagttgatcgccactaaattctgcaatcacggccagcatctctcgcagaatcgcttcgccattaaccaggtctcctgtacgggaaaccatctgaccttccggggtgtaattcacgccaaaaatatccgctaaggtcgtctccgcgtttacaccggctaatcggcccagcagcttattcttaagctgacgcggcaaatcctgtggatgataggtaaacgtggtcttcgccatacccgttgccgaatattgctgcgtcatcaggccaaacaacgaacccaggttggtatccaaaatcgactgaatattatcaccgaacatcaggttccagttacccgtggtcacctgaatatccgctccccggccacctaccgcaaagttgaatgccagtttctcattgacctgacggaatttattcgcgcggctcattgtgcccatatcactcacattgcgggtgagccactggttgaattttttattcaacgtcacttcaatatcttgcttcaaaccacggctactacgggcatgctgtgaatccagatcaaccagcgttttatagtccacgctgctggtctggtccaaaccggacagatccagcacaaattttttcgcaccggcgagggtccattgctgatcttgcgccgccagccactcctgcttttcaccaaaatgagcaataccttgcaagaccccggaaatacgggcggtaccatcaaacggattaaccagcggcggcgttggcagagatttatccatcatcacaatcaggtcattactgcgcccctgattgaaactgatgttacggttgccaataaacatctgcaccccttcaagcgcctgataaccggcaatatcgacgcggtgtttactgtcgccattgccgatgtgcaccatcacattattatccccgaaaaccagtgacttaaagccccccataccgactttgacacccacgtttgaggttccccaattgagcgcggtgaattcgccattccccacccccacctgaatattacccgagtaacttagccagttattcgagatatcacttgaatcggtctcaatgttatttttgcgtttctctggtgcaatgaaaatatcggtattatccacaaccgcccctctggccggcatctccgcatccgccatgccgacacgcgaaagatggatatcgctttcagcaatatgatgacgcacgcgctctgaacgggtttcaagttcgcctttttcattccaactcaggacgactttgttatcagccagcttatggatccattgacggcgttcattccaggtaaatttacggccgtccacatcaacggcgactgcactacgacgagccgaaaccgtcgtctgaataccctgctcctttaaggccgtaataaagtgacgggcaaaaccatttcgtttgtcatcacttatcagcgaacaacccacgatgctaatgtggtctggtttacccgcctgactaaagtttcgagtgaattgtttgagtttcacggccagctcatctgcactgtaactacccagacgagtgtaattctgctctgatttgctacgaccatgccccacaagttgccaacgcaacttgtctgatggtttaagttgagataaatcgccgtagacaacacggtatttaccctcagaatcaagctgaaccacgacactggaatctgggtgtttacccgccagattagccgctgcttcggcgacagcaaggtcatcctccacctggataatgatctgactatcaaaatgcgtttcacggccatcggtttgtggtgttacctcggcggtttgccagagctcaacgggcttatgagctaactttaccgctggtgcgacttgcaaactattaagcaattgaacacgcggcacattggcaacatcattatatctacgcaagccccccttggtaataagctgattcagtaacgaagtgccgccatttttcaccacagccgtttccaataccttatttttgccagataatgcggttaaatcttccacaggcgtgtggcttttctttttcgctattatttcaagctgagcctcctgaagtgcctgagcatagttaaacaactcggttggcgtccagacaccaaactttggcagccacttatggccgacaagtttatctgctccccctgcttttaatattctggcaacaatgcttgaacagttattcctcagcagttggtaatgttcattaggatcattgctgattttacgccatttcgcctgcattgccgccacatccagaccttcaagattaatacgaaatacgcgcccttgatcggcttcgcggtctctaaagttctgaatatccgccaactctcgctctttaaattgacgaatgacattggcagtacgtttttctatcaattgagggtcttgaacatttttattggcttggtatcgcagttcttccgcaaaaaacctgccaacatctgccctctcgtgttcataaccattccacatgtcaacaaatggctggtatatctgtttaggaataccggatgattgcagcaatctaggatctgccaatgccatcatagtaaagtcttcagtaacatctttgaaggcgacatctaccccttgtgcccattctagcctgctagtgaaacgttgtaatttatagtcaccatatctcaaaccgaacttatcgcgctcttcgtaggcgacatctatttcaagggttctatgattcaacaacggccaccaactggcataatttctcttattgataaagcctgcgatgtccgcattaacatgcgcacgcccctggccaatttgcattgcgccgtggcctaataggctatgagcgcttggtttccaaacaaacagtgtggcacttattggagataaatattgctcaatcgcctgatggatctttcttaaaccagagacatcaatacctttcccgtcattcgataaatcgctggctttcagattcgagaagacggcatctgaaatatcttgaccatattcttgaataaccgccgctttgacttgctcaaccgccttatcagcactttccgctttctgattaatatgaatattttccttaccccgagtaacaaaatcaccgttttcatcaatataaaggtgttttgaatctttaagattggcactgccaagctgatcatacagcctactgaaatcgccttgccctgggatttttacggtggacccagcaaagaccatcgactcattaaagcacgtgtcaatttgagacaataaggccctcatcgccggtacacgacctgagtcaggatgacctaagaggtatccttcaacttgttggcgcaaatcggataattttctaaccacattcaatatatagtcttttctgccttgttggatattgtgataactctctagcgcatcaatgacttttttgtaattatcaccacgaattttgcccaccaccgatgccgcttcctgaaactcacttaccgacatcaactttggcaagggtttccaagcgctatccacattctccgtaagaattttagtatttctttgatgattaaatacaatccggtcttcaatgaaatataactcatcgggtaacctcgtattatcgttaccattatcaaaccactggtcgacatcgacgattttttctaaataacgtttcgtaattatgctacacatagccccatccaacccattgttatacatagaattatgagtggtataagatgtagcgctattttgaaatcttatttagtacgacaacgttgagctcttttttttcactttcccccaattcttccagattaacaccagaaattatcggcacttttctaatgagttcacgcgtctcatgtaaaggagatcccataatgctgtcagattgtgtttcaacagaccgaggaattagcgaaacaccggtattttttgcgcgaattcccgcgttgatctgcaaccggctaacagcttgtttcgcactcgccaacgctcgcaactcttcttcggtcagcccctgataatatcggtttcccgcttccggcattgattccggatcgatatggctgccggtttctcccgcgccagttgactcataggctttttctcctgacaagccgctgccacttgcaccactgcgaacaggcttgtcattgctcagtttcgcccctttagcatccgcctgagtctgagccgctttattttccgccgccgcaatatctcgctgaccccgattttctgcattctgatacgcgatattggcgttatccttcgccttttccgcttgctgctgttgcaaaagcgcttctttttctctctgctctgcttttaattgcgcctctacaccatcaagaatagccttatcacgattttgtttacctttttccgttccggctgctgatagcaccacggtatcttttactttttgctgtatatcaatagcatcccgatggatatccgccagccgtttttctaatgtcggcttaatatcatccaatcgtttctggatgtcctcagagattccacccgcatagtcgagataatggctctctaactcacgactctcatcagtttcatctttaagtgctttaaatttgtccgcgagtaaagtcagctcttccgtcacggcctgcgcttctgcttctatcgcattgcgttgtatcagcccattttggctaactgctgcctgatccgttaattccaactgggattgcgatttcgcaattcctgccagttgtttctcttgttcctgttctaacagttggcgatctctttccgctttttctttatcgcttaatgcattttgtactgctttaccctgtctcacatgttcggtaaccacatcggtttgtcgtgggttctcagattttgcaacaacgttatccagaacatagcctacaccatcattcaaaccggttcctttaaactcaatgcggttactgcctgcccgtgcaattaattccagcgttttactttgccactctattgcatttccagacgttgagaatactcgttttccattccagaaaacgtccataccattgttgataatataggcattggaacgatgagcaaaatcaaaactcagtgaaatcacctcgccttcagacaagttttgcagatcctggtaaatcgtggtgtttctctccgcatcaagttcactgacgcgttctccatgactggcaatatcaaaaccataaacactcgctgaaccatatgcctctataccatgagttgactgccagcccagctcaccttgttcaaagtcaccattgacgatcaaatttttactctgatctgacaccgattgcgttttttgactcaaagcaccttctattgaactgacgtcaggcgtctccaccgctgtgacaacaccattgagatgatgggttaaatctgaatttaccggcgcaatttcatccagttcaaaaccatcaatagcagaaactttcgctaaatgaatcgcccctctgcctctatgagtgcccgacgtgttaacttcctccccctgcaccagatagttgatcgcctgactacccatcacaccgagtaccgtttgtttgatattgttgaagaaagcggccagtttgttgctttccgtattactcgcggcaaccgccaggctgtaaaaatcaccctcacctatcttaatcgccacattattgcgcgcataagaggcattaaccgctaaaccatgacccacctgaatattggcgttactctggcctttcatgaccgccacattcaggccattgcccactttggtattgacgttatatttaccccacgccacattaaccgaaatacccttacccacatgggtgttaatattcgcgtcgccatgcgcggcggtaacatttaaaccgttgcctattgtcgtggtcacgttagctgtccctttcgccgccgtcacctgcacaccgtctcccactttggtgacaatattgccttcgctccataaggcattaaagctgtctccctgacctacctgagtgattatgttggccttgcctttcgccagcactacattgcgcccgtcaccgactttagtaacaacattggcttcgccccaggcaccggtataatcgtcaccgttacccacatgggtgataatgttggcatccccctgcactaccgtgacttcctgtcccttccccactttagttacgaggttggcttgacctttcgcgaaattataacggtcgccatcaccaacctgagtcaggatattcgcttccccccaagccgcattcaccccggcaccatcgccaattttggtgataagattggctttacctttggcaaaccccactgtcgtgccctcgccgacatgggtcatcacattacccacatcggaaataagcaggccaactgtggtaccgtcgcccactttggtcagaatattgcctttgccaagcaggatactggcggttgtcgcatcaccaacatgcgtaataacgttcgctttcgccgccgcaacaacccccataaaatcatcacccactttggtaacgatattggcctcacccagagccaagacccccgttaagccatcccccacatgggtcatcacattggctttaccaaacatggccgccagcgttgtgccattaccgactttggtcatcacgttcagttcaccggcaaacaaaccgatactggggccattgcccacatgcgaatagatattggctttccctaccattaaggcagcggtcaggccgttaccgactttggtcagcacattggcacccccaatcatggccgcaaaggtattgccctccccgacatgggtaaaaatattggctttgccgatcatcgccgccaacgtcatgccattacccactttcgtggcgatattgccctttgccagcatcagcgcaacactggtgccatccccaatatgcgtaaacacattgcctgcggcgaccatcaatgccagcgcatcaccgtcacccactttggtaaaaatattacccactccccccattaatgcccatgcatcccctttgccgacatgagtaaacaggttacccgcgccaatcatggccgcaattgatgtaccctccccgactttagtgaagatgttccctgccgcggccatcacgcccagtgtcaaaccgtcgccgacatgggtcaacatgttgcctatgccgaacaggatgccagctgtgtcgccctttccgactttagtcaagatattcgcgccacccagcataacgcccgtggtattgccgtccccgatatgcgtaagaacatttgccccgctgcccatgaccgcccgcgcatggcctttccctttcttggtaaagatgttggctccacccaacgcaatggcggtggtgtttgacgtttcagtcccctcactgagatggctgataatattggcaccgccaagcataccggcaaccagactacccgcaccgagcttagtcagtacgttagcgccgcctaacagtacagaggagatgctcccttttcccgcctgagtgatgacgttaaaaccgccagacccagaccaatccgcgctaccattacctatctgagtatgcgtgttatatccgcccagcatccgcacccggctgctaccgttgcctttgtggattgagatattgccataagccagaagatgagccaggtattgcccatccccgatacgcacaagaacatttaccgcgccaccggcgtaaacatccattttcccactctgaccccggtgaaccagaacattggctaaacccgtgccacggaatgtcagatcgcccttttcacctttttttacaatcacgttggcggcacccgcaccgtcaaaatgcgtatcaccgaactttgagtcgtgcaaaataacgttcgctgcccccaaccctgtgaaattaatatctccccgcgtgacatcagatttaataatgtttccgccccctgcaccgttaaaattaacgtcaccactgcttgcagataatttcacaagatcttgctgatgatattctttgctatgcactaattgatgggcggtacggcgcactgtattgatgtcatattgaagctgacttaatgtgtaaccggagccagcagaggcatacccgttatcataggaaaactcttcattggctaaatcacccgtataatcgcctgttttataccaggctgttgcgatgtattttagttgctttgtttcgggatcattggccaactgaacttcaaccactttggtatagggtcccaatactttggcatacacataagtattgggttttcggttcgatttgactgcggaaacatcgactgtgctaccatcagaaaagacagcatacccccccattttggcatcgcctagcgagatatcctccgctttaaccatcatgccacccgtataggttacccactgatctgacaacaggttttcctcgatagcatggatcgtgacgggttgcagacgctcaaagattaaaccggagagatgataagcgccattagcatttaccgtgataaatccattgcctgacgaaatttctttcgccgcaagattttcaaggtgattgcccgctttataccaggaagtggcataataaccgagtctgcccgtggtgggattatttcgcagccgaactttactgattttagtgtacattttgtcagcaaaggcaaaaagataggtatccggctcgacggttgatttcatccctgtaacttgctgagactctcgtatccagcttccttccatcgttgccgtcgttaatacaacttctttggctttagcaaactccagtgtctcatcatcgaaatcgctattcgcatctattctggtgattacattgtaagcccccgcaccggagaaattaatattgccatacgcgacatcagaatagagctggctataaccgccgacaccttcaaaagtaatatcaccgcgggtctgttcatactcgtctttattttggtatacacgctcaattcgattcgatgcccccgcgccacgtaagataatattaccctctttacctttacgtacgatgtgattatcagcaccggccccgttgaatgtaacattaccgtgttctacccgcgagctgatattgtttgcagcaccggtgccattaaacgtcacatttccctgtgaatcttgataacggttaaaccaggtacggtcaatatcattgcctgcccctgcgccggcaaaatctaaatctccccgattagtttcatgccataactgattgtatccaccggcccctctaaaacgagtatcaccagacaaccctttacggaccagtttattataaccggccgcacccgaataatttaaatttcccgtttcacccgtgtgatcaatagcagctacaccggcagcccccgtaaatgacagcccgccatttcccgttttatgaataccggtataacctgatactccctttaccgtaaggtcgccatctgtatggtatacatcgactttaaatgaaccaacggtaacatcatcatttccgccataagcataaacctcaccaccaataccaatagcagtaatactattaccgtcattatcgtcgtaatatcttcctgtaaagaggtacactgcacttctatttgatgatttacccataaatagtcctttaatttattatttgggttaaacagaaaaccacggcacctaacggatgtacccgttattgagaatatttaagttctcatgaaatagtgaaatcttctgatttttaatagcaaaaaattaaataaagaaaaaacccaccattaaaattaatatcagatattgtttgcatgaatttatcagacatactttttccaaaaagtaatttattaataaaatggatatatacccgtcatctttcaagttgcttctttgttgactgcactcgctcaccccggtcacatagttatctatgctcctggggattctctcccttgccgccgcgatgcatcttgaaatccatagggtataacaaggaaaacgccaaattcagaaagattattatcgcagatctctttctgcgataatatcggaaacacagagaagataataaagtaacacctatgatataaaacttcgtcaattatttattccatctccgtaaataaccatgcagattataaccatcaaaacagtacaagtaactaaacaaccacctactaaagtaggtgggttagtgattaacggactgaaagtccggatacgcgtcggctaaacgacgcgtcaattatccatcctgaaattatcattcggattgggttcaaaatgatgttctaaatagcttttgatcatttcctccgttaactgccccaccgttgcacaaaaatagcctcgcccccaaaaatgttggccccagtaccgctttttcaaatgcgaaaattcttcaaacagcttactggccgttctccccttcagccttctcatgatttcacttggcgctaatgttgggggactgctgacgagtatatgcacgtgatcttgactcacaactccctttaatattctgatttcaaaggagccgcatgtctgacggattaattctcgcactcgacttgccacttctcctgtcagcactttgtatctgtatttcgttacccacacaaaatggtattcaatctgaaataccgtgtggctgccatatctgtaatccatgttgcacctccggtacaacacagtatcgcagctaaagctgaccggctaaagccggtggttttaacctttcatttggaagaataaaataataacaccttacttttttggcaatgaaattataaccaataaaacttattaataaaaataattcttgaacagtgaactataatataatgaatatctattaccccgcagtaaaaaaggctcaccgattctgtgagccttttttattattcattttaacttttatttttgcgaattaattatgcaaactgcaccttacccacagtggtatctgcccacgccgttgccatgacgattttctcctgactcgccagattgtcaataaagccattatctcccacggtgggcgcaaaactgctcattgcctggattagggtatcaaccgcattatccgacagcgcagtaaactcccgctcccccgaggcattcttatcccccatctgcaccaccagtttggctcggttaccattaaagtaatcactaaaggtgactgaccctgttgattcaaagacgccctgcgcagttttatcctcaatatgacggtttactgataacaccagatcatatccactgcgctggaaccacaggttttgccagtcaatatcgttaaaaacaatcatatcttccgcattgatatcatcaacctgactgtcaatgacctgaccactgaccacaaagctgtctactcctgcgcccccccggaagtcgttctggtatccccccagcaccagcagatcctgaccttcaccgccgtcaaactggctgaatttcgacattgtggccgctatcaggtggtcatcaccttctccgccattaattaccgcatgatagcccatcagtttaataacatcgtcacccgcgttaccgtcaatctggttgtcattaccaaacacccgaccaaagtcatggccttcacccagctcaacccggttgttattcccgatggtcacggcataatcctgaccttccccggtctccacccggttgtagttgccggaggtaacaacgtagtcgtccccgt

SEQ ID NO: 30 - DNA, 97291 bp, Photorhabdus luminescens
tcatgtatggaattgcaaactagagcgaatgtgaaaaaatttgaaaagagaaatgacattgagttaaataatacttctacttctactcataatcaggatgatgaggctgcgacagcaaaatattggtatagagggatgggaaaagatgaatatatattatagaccgcaatggatataatgcaatcccttgtgttacagaggcgagttattgtggaattacacctcaatatacttatgcaaaaacatatccgacaagtgaaaagcctaaaattactatagagttcagtacagaaggatttggttggttatataacgaatttacaactcaacatcagtgtcaaattaaagcggaaggtggaggttcatatgggcttggtagaacaggaacatcgggtgatagagtgagtagctgtaagcctgctgaatatagggtaggggttgaatttaaccgatggttatcaggacataaaatacaagctcaagtttcttatgtattgctaccgaaaaaaccaaaaaaataggatttaacatctattctgttaccatgcaattattaatcttgaattaactctaaaggtgaggtgccgcagatatgcggcacgattaaattgttttttgtatttaattgtgttcagttagatagcagaaaaattttcattgaaaaatattttacaatagtgataaataattatttgatttttatgtattttataatcaagcataattgcaatcttgtgaaggttatttagattgttatgatataaaaaatcattagttattatgttatatatagaacagtgaatgttgataagttgcttattttatatattgttgaaatttttctatatttgttcttatgtgtttaaataagatattatttagtttaatgattctgtaatttgtgttttttgatttagtaatctactcttagttaagaaagtaaataataaccaatttaattcaatgagttatattgtaatgttctattgttattaatttattatttacgactgaattgtgatttgaattattatttatgccgtaaattaaatattaacttaataataacgaaattcatttttgttccatttcgtgctaaaaccataaatcaagtaaggaaagaaatatgaatttgaataaaaaggttttctttatttctccgtttttattagctatgagtagtttcagtatggcatgtatgcaagatacggaggaaattaggaatcaggtaaaaaatgcaataactgcaaatggattggcaaagactaaagtcatgtctatgtatgaaaattgcaaacttagagcgaatgtgaaagattttgacaagagaaatgacgttgagttaaataatacttctactcataatcaggatgataagatagacaaagcaaaatattggtatagagggatgggaaaaagtcaatatatatcattagaccaaaatagatatactgcaatcccttgtgttacagaaggagaaaatgactattgtggaattgcacctgcatatacttatgcaaaaacatatccgaaaactgaaaagccaaaaattactatagaattcagtacagaaggattaggttggctatataatgaatttacaactaaacatgattgtgaatataaagtggaagctggaacattatcatatgggttaggtaaaaaaggatcgaagtgcaaggttcctcctcaatataatacaggagttgaatttaataaatggttatcaacgaatgaaatacaagctcaggttgcttatgtattattaccgaaaaatccctaaaaataggatttaacatctattctattaccctgtaattatcaatcttaaatttgtgcaaataactataaaggtaaggtgccgcatatatgcggcacgattaaatttctgatttattttgcgaaatgtacctcaatagcacttttagcatcttgccaggcttcttcaagtgtatcaccagcaaaataacagccgagtacatcagaaaaccagcatctttccgggaataaaaagaaaataaaaaggctgaatccagtgaagtacaggattcagcctttatcagtcattaatctgctacggataagaaacggttacgcttccccttgtgctgattgaattgcggtcagtgcaacggtgtaaacaatatcgtctaccaaagcgccacgggacaggtcgttcaccggtttacgcataccttgcagcattggcccgatggaaaccagatccgcagaacgttgtactgctttataggtagtgttaccggtattcagatcagggaagatgaacacggtagcttgaccggcaaccggtgagtttggtgctttggatttcgctacatctgccatgatcgcggcgtcatattgcagtgggccatcaatgatcagatctggacgtttttcctgtgctaaacgggttgcttcacgcactttctcaacatcactacctgcaccggagttgccggtagagtaggagatcatggcaacgcgcggttcgataccaaatgctttggctgaatccgccgattgaatagcgatttcagacagttgttcagcagtcggatctgggttgattgcgcagtcaccataaaccagaacctgttctggcagcagcataaagaatacggatgataccagcgagctacccggtgcagttttgattaattgcaatggtggacggatggtgtttgccgtggtgtgtaccgcaccggaaaccaaaccatcgacttcgccctgttccagcatcaacgtacccagaacaacgttgtcttccaattgttcacgcgcaacgacttcggtcatgcctttgtttttgcgtagctcaaccagacgtgggacataacgttcacgtacagcaatgggatcgacaatttcaatacctgcacccagttctacgccctgagccgcggcaacccgacggatctcttctggatcacccagcagaacacatcgcgcgataccgcgatcagcacagatagatgccgctttcacggtacgaggttcgtcaccttccggcagaacaacgcgtttgcctgctttgcgtgccagttcggttaattgataacggaatgcaggtggagagaggcggtgtgggcgctcagagttcgctgtcagggagtcgatccactctttgttgatgtggtgtgcgacgtagttttgcagtttttcgatgcgttcatggtcatctgccggaacttccaggctgaaactttgcaggttcagagaagtttgccaggtgttggtatcaaccataaagacaggtaggccagtgttgaaggcacgttcgcacaattgcttaatcggctcatcgatggcataaccgccagtcagcaggattgcaccgatttcaaccccattcatcgccgccagacaagctgaaaccagaacgtctggacgatcagccgaagtgaccagtagagaaccgggacggaagtgctctaacatgtgtggaatgctgcgggcacagaaagtcacagatttcacacggcgggttttgattgcaccttcgttgataatacgggcgttcaggtgttttgccatatcaattgcgcgggttgcaatcaggtcaaaactccacggaatgcaacccagaattggcaatgggctatttttgaacagcgtgttcggatcgatgttggatacgatggcttttgaggattcgtcaaagatttctgacagatccggacgggtacggccttgatcatcaactggcgcattcagtttattgataataacgccggtaatgttctggtttttgttaccgccaaattcagcacgagccagttcaactcgttctttcaactgttccggggaatcgttacctagcgccaatacgaatacgatttcagcgttcagggtcttggcaatttcatagttgagagattgggcgaatgaatgtttacgggttggaaccagaccttcaatcagaatgacttctgcgtctttggtattttcgtggtaaagggccacgatcttttccatcagcacatctttctgattggttgtcagcaaagattccacatgtgccatgtccagcggttcagcggtctttatgctggaattagcgcggatgatggtggtggtttgatcttgggcggcacggcaacgaggctgggcgataggtttgaaaacactcaggctgacgcctttttgttccattgagcggatgacacctaaactaacactggtcaagccgacgctggtgctagtagggattaacataattgtacgggacacggaaacctctttacggttgctcgttggtcaaaaatagtaccgccagcagtggctggcggttgataaaattattacgcggtcaggcgcgctgcatcttgagcgatcaccaattcttcattggttgggatcactaaagcaggacggctgttatcagtagtgatagcaccggatttaccgaagcgggccgctaggttacggtcgtgatcgtattcgaaacctaacagggccagttttttcatcacctgttcacgaaccagtgcggagttttcaccaatacccccggtaaagataatggcatccaagcggccttccattagtgcggaataagcaccaacgtatttagccagacggtggcagtagacatccatcgcgcgtttagcatcggctttggttgcatagttatcttctatataacggcaatcactggtgacttcggtcagaccgagtaagccagattctttggtcaacagtttgttgatttgttcaacgctcatgccgagtgaatcatgcagatggaaaatgattgctgggtcgatgtcaccactgcgggtacccattaccagaccttccagtggtgtcaatcccatagaggtgtcaacacattgaccattaacgatagccgagatagagccaccattacccaagtggcagacgataacattcagctcttcaaccggtttgttgagcgtttttgccgcttcacgggaaacgaagaagtggctggttccatgagcgccatagcgacgaatgccgtgctctttatacaggttgtatggcagggcatagaggtaagcctcttctggcatggtctgatggaaagcggtatcgaatacagcaacgtttttgtcagccaggtgtgggaacccttttttcgcttcttcaatgccaatcaggtgagcagggttgtgcaatggtgcgaatggaaccgcatctttgatcccttgaatcacttcatcattgatggtaacggatgccgtgaatttttcaccgccgtgaacaatgcggtggccgattgcggcaatttgatcagaaagttctggtttttcggccagaatcgtattaacaataaagttcaatgcttcactgtgggctgcaccagcacctaaagcggcttcatgttttgcgccatccattttccacttaatgcgggcttcaggcaggttaaaacattcagctagaccagaaagatattcttcaccgttagcaggatcgatgatagcaaatttcagagaagagctaccgcaattgaggaccagtaccagcttacttgacatggaagtacctatatcgtgtttgtcattgagtcttacagataagacatgtgattaataaaacgtcaattactcatcagcgtagagcatatagtgatgacattaaatgattaacatcatgctaagtgcaaagagcatgatgataaggtttaaattttcaaaaaaccttttttgcctgctctgatgttaaaagatagcgtgatttgttaacaaaatgagcctaagtgcagtaaaaagtaaaatatgctgctttactgctgtgtataacatacaagtgaatgtaggataccgatagcgagcagcaaagacaaaatatacctaatcctacaaaaaatattttatcagttacaatgtttttttaaaaaatgtgtttttaattgattgaggtcatgatgagcgcaatacctcccaccagtaatggatggctgagaaagatgcaactgggacaacaatacatgaaaacttggccgattgagaaacagttggcacccatgtttcctgaaaaccggattattaaggctacccgctttggtatccggtttatgccgccgttggctatttttactctgacgtggcaaatcgcactgggtggtcagcttggcccagcggtggcgacggcactgttcgcctgtagtttaccgatgcaagggttatggtggttggggaaacgggcatcaactccgttacccgcggcattgctgaaatggtttcatgaaatccgtgataaatttgccgcagcaggtatcacaatggcgccggtgcagcaaacgccaacttatcaatctctcgcagaactgctgaaacgcgcatttaaacaactcgatcgttcgtttcttgatgatatttgaaccaggagagagccgttgctagattattgcagtcaatgtactggaaaatcagagatgatggttcatgacgaaaagtggacacattgttgatcgcaactggagattttctcttaataaaatggtctactagccaagtttttgacactaatatcttcttttttgttgatagaggccattttgaatagcgaactcttgtgggtattgaccctgctgctgatagctattgttctttttacttccaataaactgcgcatggatattgttgcattattggtgattatcgcgtttgtcataagtggaacgttgacgcttggtgaagcgaccagcggttttagtgatcccaatgtgttgttgatagctgccctgtttgtgattggtgaaggattggtaagaactggcgttgcttatcaaatgggggattggctggtaagagttgccgggaacagcgaaactaaaatgttggcattactgatgatgactgttgcagggcttggtgcttttatgagctctacgggagtggtcgcgattttcattccagtggtgctcagtgtcgcggtaaggatgaaaatttcgccggggcggttgatgatgcccttgagttttgccgggcttatcagtggcatgatgacattggtagcgacgcctcccaatatggtggttaacagtgagttgatacgggaagggcttcccggtttcaaattcttctctattacacctattggtatcttgattctgtttgccggtatgggttatatgctgattgctcgccattggttggcaaatcatcaatcggataaaggccatgataaatggcatcgtcgtactttccgtgaccttatccgcgactataaattatccggtcgcgcgcgtcgcctggcgatccgctcaggttccccgctgataggtctttcgcttgatgagtcaaatttgcgtgctcgctacggggctaatgtcgttggtatcgagcgttggcggcgttttcggcgcgttatggtcagtgcgatgggcaatacagaattgagagaacgggatgtgttgctggttgatatgtcagacagtgaggtggatctgcgtcaattttgcagtgagcaattattagaaccgatggtgctgcgcggggagtatttctctgaacaatctcgtaacgtaggtatggctgaagtctctctgatcccggagtcggatttattgggtaagtcactgcgggaaataggttttcgtacctgctatggtttgaatgttgttggtattcgacgtgatggtgaatcgttgtcgggtaaactggttgatgcgccactgcaacttggcgatattttgctggttattggtgactggaaactgatacgtgtcctgcaaaccaaaatgcgcgattttattgtccttaatctgccggttgagatcgaagaggtggccccggcaacgtctcaagcgccacatgcgctttttagtttggcgctgatggtagccatgatgcttaccgatgaaatacccaatgtgattgccgcattgatagcttgcttgttgatgggaaaattccgttgtatcgatatggaaagtgcgtaccgctctattcattggcccagtattatcctgattgtcgggatgatgccatttgcactggcattacaaaaaacgggtgggattgagctgattgtccgtggcttgatggatattgcgggtgatatggggccgagggtgatgctggtctgtctgtttatactttgtgccgtaattggtttgtttatttctaatacggcaacggcagtattaatggcaccgatagctattgctgctgcacgtgaaatggcagtatctcccatgccatttgccatgattattggtgtggcagcgtccgccgcatttatgaccccggtttcgtccccagtgaatacgctggtgcttggccccggtggttataagttctccgattttgtccgtttgggcgtgccgttcactctgttggtgatggtgataagcgtgctggttatcccttggttgtttccattctaatggggaatatcaagactaatttcgtccaatgacaggctgaatcccggtacaaaaactttcataaagtaatccatctcctggctgtgacgatcagccagggttttttcaagtcgggctatcgccagattgaattcatggttacctgctgataactcttccagacatttgaggtaagcacacagggaatcggcctgtttaatgataaaagtttcttctgttgtatgctgactgtcatccaagattggacggaaatcctcttgcagctcagttggcagcatttccagtaattttttctgcgcgattttttctatttttttgtattcccgtgcgatatgtggattgtgatatttgaccggagtgggtaaatctccggtaataacttcgctggcatcgtgatacatagccagcaatgcaatgcgttcagcattcacattaccgccaaatttgcggtttttgataatggctaaggcgtgtgcgacaaaggccacttgtaagctatgttcagatacattttctgtacgtacattgcgcatcagaggccagcggttaatcagtttcaaacgggaaaggtgggcaaaaaagtggctcataatcatctcttacagtaaatattgtttttattgtgagcggtggatgggggtaaagtaaaccttaaaatcgtttcttatttttatctcttatttttttaaggattttcatagggaaatctgccatttatctatacccaatggatttcaagagggatcgcgacggcaagggagtgaatccccgggagcatagataactatgtgaccggggtgagcgagcgcagccaacaaagaggtaacttgaaagatgacgggtatccagactatatagcaagattgatattattaattttaatttattgttaaatataaatgttataaccgtaatagatatcctttttgcaggaagtttatgtttttactccattttgcatacaatttatatacgaaaattttatataatttacaatgacttattattcattcaggtgctctcttttattaagtttaataaatacaatgtttaattcttttatatcttgctaatgctttatataatcactgcaaaaatcgcctataaaaataaaaaaattagtctgtgttaccggtaaaaaatgaaaatttattgaccttgattttgcagagagtgattattgggtatcaataaagagagttatggaagtggttatcaaggatttctatctgacaggtgagattttcacccgtgaagaaaaagtgggtaggtgagacttatcagaatagaagaaataaacttttttctattctgatagaacgcatggtatgaataatgtccgttatcagtgatatttttctatacccgttatccttcaagttgcctctttgttggctgcactcacttatcccggtcacatcgttatctatgctcccggggatttactcccttgccgtcgcgatgcatcttgaaatccatagggtatataaacggctcttatttttactgatgatatttaccaataaatcgggcgaatttctgaattgccatctccagttcatcaagccttggtagggtcacaatgcggagatggtcaggttccggccagttaaatgcggttccctgcactaacaagaccttctcttgtaataaaaggtcaagcaccattttctggtcatcgtgaacattaaaacgttttgcatcaatttttggaaacatatataaagcgcctttaggtttcacgcaggaaacgccggggatttgattgattaattcccatgctcggttacgctgctcatacaaacggccaccaggtaaaatgaattcactgatactttggtaaccgcctaaagcagtttgaatagcgtgttgcattggcacattggcacataaacgcattgatgccagcatctccaaaccttcaatatagctcttagcgtgtttcttcgggccgtttaataccatccagccttgacgaaaacctgcaacccgatatgttttagataatccattaaatgttaccgttaacagatcaggcgcgagggcggcaattgaatgatgctcggcatcgtcatataagattttgtcgtaaatctcatcagcaaaaataatcaaattgtgttgccgggctatttcaacaacttccaataacagctctttactatatacagcacccgttggattattagggttaataatcacaatcccacgtgtgcggggcgtaattttgttgcggatatcatttaagtcaggaaaccaatctgacccttcatcacacatataatgcacggctttgccactggaaagtgaaactgccgcagtccagagaggataatcaggtgcaggaaccagcatttcatcaccagtattcagtaatgcttgcattgcctgaacgattaattcagaaacaccattgccgatataaatatcttcaacggttacgtccatcatattccgggcttgataatgttgcatgatagctttgcgtgcagaatacagacctttcgaatctgaataaccctgtgctgttggtaagttacggataacatctaccaagatttcatctggtgcttcaaaaccaaagggggctggattaccaatatttaatttgaggactttattgccttcttcttcaaggcgtttagcttccttgagtacggggccgcggatatcataacaaacattatccaatttgctggattttttaactgctagcatagagagtcttaccttatcttggtaaaaaaagtcgcctggcatatagcgtgtaacatttaatgtactcctccctctgaatgttttgaagatgcattgatatatttggttaaaatggttgttttagtaggggagtggttatttgagtatctttttatgtaaattatgttagcgttaagttcttaatttactgtaaatatcagatttataatctgaattgttgttgttttttagtgtggaaatggggtgtttttagtgtgataacggtatgatcgtgccattgtggagagaaagtgagcatagctcaatttgccaataaaaattgttgtgtttgtataatttattcttatgtataagatttggcttgagttggcaattcagaactatatattttagaaagatcaaacaatatttttgatcatttctggaaactagttgtaaatttatctgaataggattattaaacattagtgatattgtagatttttactttatatttagtttttctgatataacttatgttattctttgacgtgagtcagaaaacaaaataaccaaactagaaattacatatagggtgttgtaaatagggattgtcctcaatttatttaggaatccgagtaacttttgctaagaagaggagaaaataaaacccacaatgggttcaataggtaaaaaaacagcagtaaatctttgccctatttaatagagtagagtactgtctaagtgatgttaatttaatttgatagtgcttacgtaaaaacaccaggttagttagtaattaaaatcaaaaaaaagtgatgaataaacaatgataaatgcaaatcgtccgataatgaatctcgatctcgatctgctaagaacttttgttgctgttgctgatttaaatacttttgcagcagcagcagcagcagtatgcagaacgcaatcggctgtaagtcagcaaatgcaacgtttggagcagttggtgggcagagagttgtttgcccgtcatggccgcaataagcttcttacagagcatggtcttcaacttcttggttatgcaagacaaattctgcgcgctaacgatgatgccagcgcatcattaacctatagcgatgcagaaggtgaactaagaatcggtgcatccgatgatacggtggatacactgctcccttttttgctaaatcgcatcgcttccgtttatccacggatggcaatagacgtccgtataaagcgtactcagtttattgaaagtatgctggataaccatgagatcgatttggcactcacaaccgcaaaaattagtcatcatccaaggactgttctgcgttcaacaccggtattatggcattgtgctcctgatttccagctacaggtaaatgaacctgtgccactggttgtgatggatgaaaccaatccattccgtcagttggcgttggatacgctggatgaggtgggagtatcgtggcggattgcttatgaagcggcttctctgtcggcagttcgcacggcagtgaatgcagaagttggtattactgcccgtcctttggaaatgcaaaatgctgatctgcgtattttaggggagagtgaagggcttcctcgtttacctgaaacccagttctctctgtatagacatagtaatgagcaaaatgaatctgttctgacggtttttagtgcgatagagaataagaaaacgccatacacgataacgagtgtttctgaagaacttcctgatgatgacgatattattgatgagtaatatctgaaacacttctccttgctaatacctccattatggatggaaggaggtattagctcctcgaatatatttataagtaatcatcaactaaattcaccttattctgttgttatcgtcatcattaaatatacggtagcatttttcttaacaccccctgatttggttaacaaattgttatattgttaacaaggtaataatttgctgaattgatgaaataagaatttctgtagtgaacgggaacttttctcgttgctaatggataaaaaatataatttcttcagatttgaatgaattatcatcagcagtaaaatttttttctgtcaaattgtgtacttgatcaaagaaatactccctatgtagcagtggaaaggcaggtttttcctgagataatgatgtagtaaaagcgagttatcggttaaactagcttccgccactgtttgcgccagttaactgacacgttttagcagtgcggtagcacgatccgttaagactaagtttgttatttgtaaataaatgttagattaattttgtcaaaacagacaaaatattgttgagaggagtaaaaaccaagaagattcactccatcaatcattgattaacagtgtttcagatttggttgttaccccttcccttgaatcgatgtggtgcaacactgccagacaaaagagcagacacttttgacaccacttttgatgagtaagcaatgagtatgtcaacatccactgaactctttgcccatcactgggcattcgcggtatttcttttaggtgctttcggtctgtgtgctttgatgctgttaggggcatttttcttgggcgggagagcgaaagcccgggcaaaacatgtcccttatgaatctggtattgattctgtcggtagtgctcgtctccgtatgtcggccaagttctatctggtcgctatgttctttgtcatcttcgatgttgaagcgctgtttttatatgcatggtcagtctctatcaaagagagtggctggttaggctttatcgaagcaagcattttcattttggtgttactcgcaggcttgttttatctggtgcgtattggggcgctgaattggacgccatctcgttcaagccgccaggtaagtaaaccaagtgttgtgattaacattaataatagtcatccgcagtaatagcgaggcatttaaagatggattatacgctcacccgcatagatccgaacggtgagaatgaccgttatcccctgcaaaaacaggaaattgtcgcagacccactggagcagcatgttcaccgtagtgtttacatgggcaaactggagcatgctctgcatgatatggtgaattggggacgtaaaaactccctgtggccctacaactttggtctttcctgctgttatgtggaaatggccacatcatttaccgctgttcatgatgtcgctcgttttggcgctgaagttttacgtgcatcaccccgccaggcggattttatggtggtcgctggaacctgttttaccaaaatggcaccggttattcagcgcctgtatgaccagatgcttgagccgaaatgggttatctctatgggagcctgcgccaactctggtggtatgtacgatatttactcggtagttcaaggtgtcgataagtttatccctgttgatgtttatattcctggctgtcctccccgtcctgaagcttatatgcaagctttgttgttgttacaagagtcaattggcaaagagcgtcgtccgttgtcttgggtagtgggagatcaaggggtttaccgtgccaatatgcagtcagaaagagaacgtaagcacggggaacgtatcgcagtgaaaaatctgcgtacgccagacgaagtttaagaatctgtctttagacagtaggcgtgactcaaagtagcctaatgaatgtaaccagagcaatgtgttgcgatactaatcctgatcaaaacgaacactgatcaaagcgttgtggtgaagaatgatgatagatcagatagcgcaagaaagcgcccggcctgcgtggcaaactcatgaccatcttgatgatccggtcatgggtgagctgcgtaaccactttggcccggatgcctttactgttcagccaacccgtactggtatacccgttgtttgggtgaagcgtgaacaattactggaagtaatgactttcctgaagaagctgcctaaaccttatgtcatgctattcgatttgcatggcatggatgagcgtcagcgtactcatcgccagggtctgccagcagcagatttttctgtgttttatcacctgctttctattgagcgtaaccgcgatatcatgttgaaggttgccctcagtgaaaaagagctgaatctcccgacggcaactcctctgttcccaaatgccaattggtatgaacgtgaaacatgggaaatgtttggcgttgtctttaacggccatccaaacctgcgccgcattatgttgccaccgacttgggaagggcatccgttgcggaaggattatcctgctcgtgcgacagaatttgatcctttcgaactgaccagacagaaagaagatctggaaatggaagcgctgactttcaaaccagaagagtggggaatgaagcggggtaccgagaatgaggactttatgttccttaaccttggtcctaaccatccctcttctcatggggcattccgtatcattctgcaactggatggtgaagagattgtcgattgtgtcccggatattggttatcaccatcgtggcgcggagaagatgggagagcgccaatcttggcacagttatattccctatacagaccgtattgaatacttaggcggttgtgttaacgaaatgccttatgtgctggcggtggagaaactggcgggaattgaagtgcctgaccgggtaaaaaccattcgcgttatgttgtcggaattgttccgcatcaacagccacctactttacatctcgaccttcattcaggatgttggcgggatgaccccggtgttcttcgcctttactgaccgtcagaaagtgtatgatctggtggaggcgattaccggtttccgtatgcacccagcgtggttccgcattggtggcgttgctcatgatttgccgcgtggttgggatagattattgcgcgattttctcaactggatgcccaaacgtcttgattcctacgtgaaagcggcgctgaaaaatagcatcctgaaaggccgagctattggggttgctgcttataactccaaacaagctcttgaatggggcaccactggagcgggtttgcgggcaacgggtattgcgtttgatgtgcgtaaatggcgtccatactccggctatgaaaatttcgatttcgacgtgccgattggtaataacggcgactgttatgaccgcgtgatgttgaaagtggaagaagtgcgtcagagcttgcgaatcttgaaacagtgtctggacaatatgcctgaaggcccatttaaagcagatcatccactgacgacgccaccaccgaaagaacggactttgcagcatattgagaccatgattaaccactttttgcaagtgtcatgggggccggtaatgccagcaaatgaatctttccaaatgattgaggccactaagggcatcaacagctattacctcaccagcgacggcagtactgtgagttaccgtacccgtgtccgtacaccgagttatccgcatttgcagcagatcccatcggtaattcgcggtagcttagtttctgacctgatcgtgtatctgggcagtatcgattttgttatgtctgatgtggatcgctaactatgcaaagtgaaattaacgcgagtgctcaacaagcgcgccttgatgtggttaacgtaacagagtctcaggcaaaagcagattttgtgctgagtaccgaagagcacgatgctattgagcatgaaaaacaccactacgaagatccgcgcgccgcttcgatagaagcattgaaaattgtacagaagcatcgtggctgggtaccggatggtgccatttacgcgattgctgatgtgcttggtattcccgctagtgatgtggaaggtgtggcaacattctacagccagatttatcgtcaacctgtgggccgccatattattcgttattgtgacagcgtggtttgtcatattaccggttatcaagatgtccaggctgcaattgaaaaacatctaaatatctgtccgggacagacgacgaaagatgggcgttttacgctgttgccaacctgttgtctgggtaactgtgacaaaggcccgaccatgatgatcgatgacgatacgcacagttctgtcagacctgaagagattgagaagttactggagcagtatccatgacagcatattcaggaataaaagaaattattcttactgaggaaaaccatcctcttacttggcgattgcgtgatgacaaacaaccggtatggttggatgagtaccgtagcaaaagtggttatcgtggtgctgaaaaagcactgaaaagcatgtccccagatgaagtggtttctctggtaaaagacgccgggctgaaaggccgtggcggtgcaggtttctctactggtctgaagtggagcctgatgccaaaagatgaaagcatgaatatccgttatctgctatgtaacgcagatgaaatggagccgggtacctacaaagatcgcttgctgatggaacaacttcctcatttgctggtggaaggaatgttgatcagtgcatttgccctgaaagcttatcgtggctatatcttcctgcgtggtgaatatgtggaagcggctgtgcatctgcgtaaagccatcgaagaagctaaagcagcgggtttgttgggtaaaaacatcatgggcagcggctttgattttgagttgtttgttcataccggcgcggggcgttatatctgtggtgaagagaccgcactgattaactcactggaaggtcgccgagctaatcctcgttcaaaaccgccatttcctgccacttccggcgcatggggtaaacctacttgtgtcaacaatgttgaaaccttgtgcaacgttccttcaattctcgaatacggcaaagagtggtatatcggcctgagtgcaggcaagagtaaagatgccggcactaaactgatgggtttctctggtcgggtgaaaaatccgggcttgtgggagttgccatttggtacgactgcccgtgaaattcttgaagattatgctggtggtatgcgtgacggcttgaaattcaaagcatggcagcccggtggggcagggactgacttcctgactgctgaacatctggatctgccaatggatttcgaaaatattgctaaagcgggcagccgtttgggcacggccttggcaatggcagttgaccatgaaattaatatggtttcgttgacgcgtaatcttgaagaattctttgcccgtgaatcttgcggttggtgtactccatgtcgtgacgggttgccgtggagcgtaaaaatcctgcgcgcaatagagcgtggggaagggcaacccggggatattgaaacattggaacagctctgtcgtttccttgggccaggcaatacattctgtgctcatgcaccaggggccgtggaaccactacagagtgccatcaaatatttccgtgatgaattcgaagctggaattgtgaccaaagactatgggaacacccatttcattgcgggtatccagtcaaacctgttaaagcagcgttggtaatgggttcttcacgaaattagcagaatttttgattaacacttgctgaaaagcaggtcatttggaagcatgctgactatggctacgatacatgtagacggcaaaaaatatgatgtagacggggctgataacctgttacaagcttgcctctctttggggttagatattccttatttttgctggcatccagcgcttggaagcgttggcgcttgccgccagtgtgcggtgaagcaatatcaaaatgcggatgatacgcgcggtcgtctgatcatgtcctgtatgactccggcaacggatggcacttttatctctattgatgatgaagaggctaaacagttccgtgagagtgtggttgagtggttgatgactaaccatccgcacgattgcccggtatgtgaagaagggggcaactgtcacttacaggatatgaccgtgatgactggtcatacattccgtaaataccgtttcactaagcgtactcataacaatcaggaattggggccgtttatttctcatgaaatgaaccgctgtattgcctgttatcgttgtgtacgttactacaaagattatgccgacggcgctgattttggtgtttatggcgctcacgataacatttattttggtcgccctgaaagcggtacgttggaaagcgagttctccggtaacctggtagaaatctgtccaaccggggtatttactgataaaacccattctgaacgttataaccgtaaatgggatatgcagtttgcgccaagtatctgtcaacagtgtagcattggctgtaataccagcccgggggagcgttatggtgaattacgccgtatcgagaaccgttataacggtacggtaaaccactattttatgtgtgaccgtggtcgtttcggttacggttatgtcaaccgtaaagatcgccctcgtcagccacggcaattgcgtggtgatcattggatctcgcttaacgctgaacaggccatgcagggtggggcggatattttgcgtcaggccaaaaatgtcatcggtatcggttctccacgcgccagtctggaaagcaattttgcactacgtgaactggtgggcgcagaaaacttctatagtgggattgctgcggctgaacaacaacgccttgatataatgctggaaattctgcaacagggtggtgtttatacaccgtcgctacgtgaaattgaaagctatgatgcggtattgattttaggcgaagatttaacgcaaaccggtgctcggatggcactggcggttcgtcaggctgtgaaaggtaaagcccgcgaaatggctgctgctcagaaagttgctgattggcagattgccgctgtgatgaatattggtcagcgtgccaaatatcctctgtttgtaaccaacgtggatgatacgcatctggatgatatcgcagcgtggaattatcgtgcgccggttgatgatcaggctcgttttggttttgcagtcgctcatgcattggataacacggcgccagccgtcgagaatttgcctgacgaattgagagccaaagtggatatggtggcgcaagcattgattggcgctaagaaaccgttaattatcagcggcagtaacgtcggcagtgatgcgattattcaagcagctgctaatattgcctgggcactgaaagaccgaggttcagatgtcggtttgtcgtttgttgcaatctatgcgaatagtattggattggcaatgatggaggcccagccactggatgttgctctgcaacgtataagtagtggtaaatctgatacggctattgtgatggaaaatgatctctatcggcatgccgcagcagataaggtagacgatgcactgaacaatctgaaaaacctggttgtggttgaccatcaacgcactgctatcatggataaagcccatttgattctgccagcttccagctttgcagaaagtgacggcacgttggtgaatcaggagggtcgggcccagcgttatttccaagttttcgaaccctctttctatgacaaatcggtggtgatgctggagagttggcgttggttgcactccttgcatacaacgtatgctgaacgtcatttggattggacgcagcttgaccatgtgattgatgcctgcgctgaagcaatgccacagcttaaaggcattgttgatgccgcgcctgattcgacgttccgcatccgcggtcagagactggctcgttcaccgcaccgttacagtggtcgtactgctatgttggcgaatatcagcgtacatgagcaacgtcagccgcaggatgtcgattcgccatttgctttctcaatggaaggtaacaatagtcctaatgcccatcgtcagcaggtgccatttgcatgggcaccgggctggaactcaccacaggcttggaacaaattccaggcggaggtaggtggtcatctgcgctttggcgatcctggtgtgcgtctgattgaaaccactgacggcggtttgaactattttgatcagattccgacagcatttactgcacaaaataaccaatggacagtggctccttaccatcatttgtttggtagtgaagagttaactcaacgttccgatgtgattcaggaacgcatgccggagccttatgtgatgctcaatagcaaagatgcggatcaattaggtgtgaaaacgggttctgttctggagtttgattgttttggtcagcaactgcgtctggcagttcgtctgagtgaaaatcttgctcaagggcagatcggcttgccaatgggaatgccgggtattcctccggtattggccggtgtttccgtgaataatctgcgggaggttgcacaatgagttggttaacccccgaaattattgatgtgctgatcgctgttctgaaggcagtggtgatactggtagtggtggttgtctgtggggcattgatgagctttggtgaacgtcgtttgctagggctgtttcaaaaccgttatgggcctaatcgcgtaggttggggcggatcgttacagatcgtcgctgacatgatcaaaatgttcttcaaagaggactgggtaccccgttttgcggacagaatgatctttaccttggcaccggtgattggtttcgtttctctgttgctggcatttgccattgtgccgatcacgccgacttggatggccgctgatctgaacatcggcattttgttcttcatgatgatggcgggtctggctgtctatgcggtgctgtttgctggatggtcaagtaacaacaaatactcgttactgggggcaatgcgtgcttctgcgcagacactgagttacgaagtgtttattggtctctcttttatgggcgttgttgcgcaggcggactccttcaatatggtggatatcgtcaatgcacaagagcatatgtggaatgtcattcctcagttctttggtttcttgacttttgccatcgcgggtgtggcggtgtgtcaccgtcatccatttgaccagccggaagcagaacaggagctggctgatggctatcatattgaatattccggtatgaaattcggtctgttcttcgttggtgaatatatcggtattgtcacggtttctgccctgattgtgacaatgttctttggtggttggcatggtccgttcctgccgccgtttgtctggtttgcgttgaaaacggcattcttcatggtgatgttcatcctgatacgtgcctctttaccgcgtccgcgttatgaccaggtgatggcgtttggctggaaaatctgtctaccgctgaccttacttaacctgctggcgactgcggcagtgattttgtacaacgctcaataaggggggaatgaaccatgacattgaaagagttagtggttggttttgccacccaggtacgcagtatttggatgattggcttgcatgcctttcataagcgcgaaacccaaatgtatccagaggaaccggtttatctgccaccccgttaccgtggccgtattgtgttgacgcgcgatccggacggtgaagagcgttgtgttgcctgtaacctgtgtgcggctgtttgcccggtgggatgtatctcactgcaaaaggcggaacatgaagatggtcgttggtatccagaatttttccgcattaacttctcacgttgtattttctgtggcttatgtgaagaagcttgcccgactacagcgatccaattaacgcctgatttcgaaatgggggaatttaagcgtcaggatttggtatatgaaaaagaggagctgacgatttcaggtccgggtaaatatcctgattataacttttaccgtaagacaggtgtggcaattgacggcaaatcaaaaggtgaagccgacaatgaagcgaaacctatcgacgttaaaagcctgttgccgtaaggagcgatattcatggaatttacgttttataccgctgggctgattgccatattggcaactatcagggtaattacccataccaatccgatacatgcgcttttgtatctgatcgtttctctgctggcgctttcagcggtgtttttttcgctgggcgcttattttgccggtgcgctagagatcatcgtttacgccggggctattatggtgctgttcgttttcgtggtgatgatgcttaaccttggcaaatctgttgttgaacaggagcgtgtttggttgaaaccgcggacgtggattggtccgggaatactgtcaacaatgctgcttgttgtgctggtgtataccattatcaatgtttctcatggggatattgccgacaatatcacgggtgaagttgtcagtgccaaagaagtgggtatcagtttgtttggtccgtatgtattggccgttgaactggcttctttgctgttgcttgccggtatggtggtggcgtatcacattggccgtgaacacaaacagggtgaagtgctcagcaaccgaaatgcggaggaacaaccatgatacctcttcaacatggactgattttggcggcaattctatttgtgttgggcctgaccgggctcatcatccgccgtaatctgttgtttatgttaattgggctcgaagtgatgattaatgctgcggctctggcttttgttgtggtaggcagctattggggccagccagatggtcaagtgatgtttattttggctatcagcttggcggcggcagaggcgagtattggcttggcgctgttattgcagctctatcgtcgtcgccagaatctgaatattgatacagtcagtgagatgcgcggatgaacttactctatttaacaattctgctgccactgctgggatttttgctgttggcattttcccgtggccgctggtctgaaaatacatcggctaccatcgggattagttctgttggtttggctgcgttggttaccttatgggtagctatcgatttcaatagtcagaatggtgcgggtgatctggtttacagtcagaacctgtggaactggatggaagttgggaatttcagtattccgttcactctggttcttgatggtttatcgcttaccatgttgagtgtggtaacgggtgttggtttcctgatccatatgtatgcctcgtggtatatgcgtggtgaagagggctattcccgtttcttcgcttataccaacctgtttattgccagcatggtgatactggttctggcagataacatgatgctgatgtatctcggttgggaaggggtagggctgtgcagttatttgctgattggcttttactataccaatccggcgaatggtgccgcagcaatgaaagcctttgtcgttacccgtgtgggtgatgtcttcctggctatcggcatgttcattctgtatgacaatctgggaacgttgaacttccgcgagttggcgattttagcgccacagcatctggaagctggttcttcggtgattacctgggcgactctgatgttattggggggagcagtaggtaaatcagcccagttgccgttacaaacttggttggccgatgcgatggccggtccaacgccagtttctgcgctgattcatgctgcaacgatggtaaccgccggggtctacttagttgcacgtagtcacggcctattcttgatggcaccagaaatcctgcaactggttggcacgatcggtgcgatcacgctggtgttggcaggttttgccgcgttagtacaaaccgatattaagcgtgtattagcttactcaaccatgagccagattggttacatgttcctggcgttgggggttcaggcgtgggatgcagcaatcttccacctgatgacccatgctttctttaaggcgctgttgttcctggcatcgggttccgtcatcttggcctgtcatcacgagcagaatattttcaaaatgggaggattgcgtaaatccattccgttggtttatgcctgcttcttggtgggtggcgcggcattatccgcgttgccaattgtcactgcgggtttctacagtaaagatgaaattctgtggggagcaatgtcacatggtcatatcaaccttatgttggcggggctggcgggtgcatttatgacctctttgtataccttccgcatgattttcattgtattccacggtgaggcgaaaacaaaagcccatcctgttaaaggtattacccatcacctgccgttactggtattgctggtgctttccacctttgtgggcgcactgattgtgccacccttggcgggtgtgttgccgggaagccatataacggatcacacaggcaaaatgaccttggaagtggtttctggtgtgatcgctgtagcgggtattttgctggcaatggcgctgtatctgggtaaacgtcagttggtgaatggtgtggcacaaagtgctccggggcgtttcttctccgtatggtggtttaatgcttggggctttgatgttctctatgactgggtatttgttaagccattcaagaacattacacatgtattgcgaaacgatccgctaaattcactgatgaatattcctgcggtgttatcacgctggagtaacaaaggtcttagcctgagtgaaaatggacaggtccgttggtacgttgcctctatggggttgggtgcagtgctggttttagctctgctgctactggtttaatttaagggatacattgcgccatgctattaccttggctaattcttatgcccttcatcggtggcctgttgagttggcaggctgaacgcttcggtacccgtgtaccgcgttggatcgcgttaatttcgatggggttgactctggtgctctctctgcaactgtggttgcaggggggctacaccttggcgaatccgcaagggatccctcaatggcaagaagaatttgttatgccgtggatcccacgttttggcatcagtattcaccttgctctggatggcttatcgctgctgatggtggtgttgactgcactactggggctgatggctattctctgttcatggacggaaaatcagccatatcagggctttttccacttgaacctgctgtggatcttgggtggtgtgatgggggtgttcctcgctatcgacatgttcctgttcttcttcttctgggaaatgatgttggtgccgatgtacttcctgattgcactgtgggggcaccgaggctcaggcggtaagactcgtatcaccgcggcgaccaagtttttcatttacacccaggcgagtggcttggtgatgttaattgcgattatggcattggtattggttcactataacgggacaggcgagtggacattcagctatcaaaaactgctgaatacgccaatgtcacataccgttcaatacttgctgatgctcggtttcttcattgcttttgctgtaaaaatgccagttgtgcctttacatgggtggttgcctgatgcacacagtcaggcaccaacagcgggttctgttgacttggcggggatcttgctgaaaacggcgggttatggtctgttgcgtttcggtttgccactgttcccggaagcttctcatgagttcacaccgattgcgatgtggttcggtgtgctcgggatcttctatggcgcatggatggcattcagccagacagatatcaaacgcttgattgcttataccagtatctctcatatggggtttgtgttaatcgcgatctattctggcagccagcttgcttaccaaggggcaattattcagatgattgctcatggtctgtcagccgcaggtatgtttattctctgtgggcaactttacgagcgcttacatacccgtgatatgaatcttatgggcggcttgtggaagcgtgtgcagttcctgcctgcgttatcactctcttttgctgtggcgacactggggatgccggggaccggtaacttcgtcggtgaatttatgatcctgtttggtagtttcagtgaatttccgttaattataacgatttctgtgtttggtctggtcttcgcctctgtctatgccctgtatatgatgcagcgtgcttactacggtgaatcaaaatcagatgaaccactaagacgaatggatatgcgagaagtatccattgtaatggtgctgttgatattactggtggtgatgggtttctacccacaacctattcttgatacttcagcggcagcgatggataacatccagacctggtattcagcttcaatttcaactacaaggccgtaattcgccatgacaataactcctcaacaactgatcgcgctgttaccgctgttgatcgtcggattgacggtagtggttgtgatgctgtccattgcgtggcgacgcgatcactttattaacaccactctgaccgtgataggtttgaatctggctctgctgtctctctattttgtcggacagcaagaagcgatggatgtcactccactggttcatgtggatcgctatgctatgctctatatcggtctcgtactggttgcaagcctggcaacggcgactttcgcctattcctggctagaaaattatccagataacaaagaagagttctatttactggtgctgattgcgacagtgggcgggattcttctggcttgtgcaaaccacctggcatcattgtttatcggtattgagttattaactttgccgctgtttggtttgattggttatgcatatcgtcagaaacgctctctggaagcggctatcaagtacatgctgctgtctgcggcagcctcttctttcatgctgtttggtatcgcgttgttatatgcagaatcaggcgatctctcttttgccgcactggggcatcgtttgtctgacagctatatctatcaacctttgatactgtcaggcttgggtatgctggttgttggccttggcttcaaattatcactggtacctttccatctctggacaccggatgtttatcagggagcacctgctccggtctctacctttctggcaacagccagtaagatagcgatttttgcagtagtgatacgtctattcgttgaagcaccaatggcggatagtgaagcactgcgtacggtattaaccgttattgcaattgcttctatgctgttcggtaacttgatggcactgacccagacaaatatcaaacgtctgcttggttactcttctattgctcacttgggttatctgctggtggcgctggtggcggtacagaaccaccagctttcagaagaaacggtcggtatctatctggcaggttatctgtttagcagtatcggtgcatttggtgttgttagcctcatgtccagcccatataaagggccggatgcagattccctctactcataccgtggcctgttttggcataaacctattctgtctgcggtgatgacggtgatgatgttgtcactggcggggatcccaatgacgttcggttttattggtaagttctacgtcattgtgttgggtgtgaaagcggaactgtggtggctgacgggtgccgtagttgtgggtagtgctatcggcttgtattactatctacgggtcatggtcagtttgtatctgcctgcgccgaaagcgcttaatcgtgacacaccaaggaactgggcatcgactgccggcgggatggttgttctgatttccgcattattggtattggcgctaggtatctggcctcaaccgctgattgatgtaatacagcaagcgaaaattattctctaaatagccagtcggttgttacccattatttggaatataaaaacccggtaagattatccttaccgggttattgcaagttattgataacgatctcttttccctgaactgtacttcatacctgttttattcgctaatggtactaaatatcttgtattgcctgatgaagagttgggagccagccgtatttatttcagcagaatcccgctgtattgcgattccagattgtcaaggtagtttagctgatcgtgtatgagtttagtcaggttttgctgacgggcttgatcatctatggtctcctgtaattggttggcgaagatgctccatacttgctccagtttagttgcctggagtaatagagtggtacgttctttgtcgattttatgcacatcttctatactggcaatccgttgttctgcgccttttaattgggtttttaagtcgtcgctatctttagttaattgagcgatttgttgatctaatttgatcctggcatcagctagctcaacatattttagtcctgtggagatattgctcagaatctttttggtgatttcaattccttgtttgatcgcctgtttaataagttcttttttagggctagccagattcaatttgtccagttcactggcattgggaatatagtccttaaacatatcggccagattatattgacggataatgttttgactttcgatgagcttgtcgcgatctgggattaatttggccttatcctgccctttcttcgtgatatcagcttgcagttcttcttttctttcctgctcttctttcagacgctcttccagacgttctaaaataacgacattacgaacatcggcaattttgctggtcattatgttgctttcttcatgtaagctggaaatgacatttttaacatctttgttcagattgcgtacttgctctaaacgtgcttccaacagggtatttcgtgtctcgtcatccaattctgaattttccagagcagtatcaatttcgatgatggtctggaaatagtcttgaggcgggagttgtctcaggatagtttgtagttgaggtacagaggcacgagcggcttcgtcgatatctcgactgtataagcttatccgcagagttttttcctggatgatttcaatgcctgatttttgctggtgcgttaaactccagatgttttttactgcttgattcaaagtttttacactaatttctggataagtgatagttttctgagggaaagtaatgacttcagtcattttaagactcctttttttctataatcctatgtaatacggggaacgattagttatagcgatgtttgtattctttcaatgcttcatcgaaaaccctgactaattgtttagcggaaccttccacctctttccaagggtttatgacttgctggaatttagttataaaagaggtcaagttgagtgcatcgttaatttgggtgaatttatctttagaagcattaatctgggtcagcatggattgccacatgtaatccaaatggttcagagccacttctgcatccaataagcgggtatcaatgtcgctaaaatcaagggataaactagtaatagatttttgtaatgcgcgtttacctttgatgctctcttccaggctgcgtacttcttcgatcagcatgtttttacgttttcgtacttcttctgccttggaaccaaaaatgccgccagtaatagcgaggccgatcagtccccctacgataccggagaaagccaagcctacgaatttatcgtagtctttcttgagttggacaatttcctcttttttctccatgatcttatcgtccagatctccgatgctgaccgacatcttattgtctttcatcagctttcgcttattttcgacttgtggttgtaaacctagcgcaatgctgccgtttgacaatctgccgccaatcagctttagcttgaaatcggatacttcggttttgaccttttcagttttctcacgctgtttttcaatatcatttttcatggtgtcaaggatttcccctagagcagatgatacttctctgtcttcatgggtgtaggtgatccgggcgagttgtttctccgatatttctcctaatctcctttttatgcgtgtgataattggcatttcattaatgatgctaatgatattctcacctgtttcggtgatttgtttaccaataatttccaggtctatgctctgttgcagaatatcgttttccacatcgctccagctaaacgagtgagtgcggatttcttcaaacaaagtgtgaatatcttctggttctaatccggcgatatcgatcttttgataatccaagtaactcttcacttcctcaagattaaaagggagtgatagaccttttttaacatacagtttgatattaattaggtcttctttggtaaatattcctccggggcgtgcaacaccttcttgtttaccagtcagtaattgcaaggtagccgagggaatatctgtttcgttcagtgttttttccgctgaaagttgagctaataacatatatttctccattaatggttcttgctttattgaaaaattattaaatacatcaaggcacaaccgaacgtcataatactcatgttgttaaattaacgttgtgttttttattgaataatctgaattaaaaatacatatatttgcatggttaattgttgtaaaaatagtttaattcatgagttttattaaataattgtctgaatttttgtcaatcttaaattaaattatttatgattttggtatatctaatatatgaaattaaatagtatgaatttttattattttagtaattaaatgtaaaaacaatcgtttgcctttcttttttatatagtcttaaatttcattctttaattgatgctaagattataaatataaaatattttaatgttatttttgttaaaatcgttttaaaacaattggttgtgttgtttttgtgatgtgacgattatataatttctatattattaatttaaaagataggtaatatggtttttttatcaagaataagttagatgttttttgttttgtcatttatggtatgtttaaaaaatagatggaatagcatcctattttccttatgtcattgaataaagtttttgttatttttagatctatattttaattaaagtcttaattgtttatctgatggtttaaattaacaaataagaaggatttttttataattatatttggttattatagaagtgacatctgttttttatagggtgatttttttagaataataaatgtttattccgttgtttataataacggtatttatttagtaaattttccgtagtaagtaaaagagtcgtttttttataaattgcatcgtgaaaattgattatgctaatgaacttaatatttgttatcggaatggctgggtctctgatttagcctgtttcagtattgagataagagcatatcgctaacggaatcgaacaagcagccaacaaagaggcaacttgaaggataacgggtataactacataaataatcagggctttaattattattaatgccccgtataatcctactttctatcatgtcttttgaggcagaagtggtgaatcaaattgctaatgttgtcgctgatgtatgcaagactctgaataataaacaagttagcgaagttggtatccaacagatttcatttcctctgccagcaggttgcagcacttactggctggaatggctggcagcgcagtctcattatccgcagttctattggcatcacagagagggccatgaagaagtcgccgcttgtgggcaaattcatcttttcagtgatattgctttagccgaaaattttttgcagagaaaccgtcagtttccacggatacggatctgggggctgaatgcctgggatcggattcaaccagcccgtattacgcaatccgatgcaggggaagcaggttatctgtttttgccccgcatcgaattacgccgctaccgtgacgaaagctggctgtatttaaatatagctggccggcaggatatgaagaatgcacaggaatttctgcaacaattagttccgcatcaggaattctctgcattacaggcggtggtagtgaacgcggagaatgtgccggaacgcgcccgctggtgtgatttgattgagcaggctttggacactatcacccatcgtaagatggagaaggtggtgatggcgcgtaagacacaactcgaactgagtgaatctttagctgctgcacagtttatggcagcgagtcgccagataaatcactgttgttatcattttatgctagcttttaatcagcatgaggcatttttggcgtcttcaccagaacggctttacctccgtaagcagactcagctttatacagaggcgctggcggggacggttgacaattctgatgatgctcagcaagcccaaaaattggggcaatggttgctaggtgataaaaaaaatcagcatgaaaacctgctagttgttgatgatatttgccagcgtcttcaaggcgctgtggtttctgtcgatgttgctccgccagaggtgattcgtttgcgaaaggttcagcatttgcgccgccgaattcagggaaaactaaagagtgccagtgatagtgattgtttgcatcgtttacaaccaacggctgcggttgctggattacctcgtgaagcggcgcgtgattttattcgtgatagcgagttattcagtcgtgattggtatgcagggtccgcaggatatctttcctgtgaacagagtgagtttgcagtttcactacgttgcgcacaaattaacaacaatttactttcactgtatgccggtgcggggattgtgatggggtctgatccacaacaggagtggatagagatagagaataaagctgccgggctgcgcactttactgaaaggtgaatagttaaatctccgatttaatggcaattcattgaactaggataaagaaataattatttgcgccgttaggctaatagtcagcttttatagaaattctttgagtaaactatgtcaaacagcgcatttaaccgccgctgggcggaacttttattggaagctcttactcgccacggattacgtcatgtttgcattgcgcccggttcacgctccacgcctttgacaatcgctgccgcggcaaataacaaactgatttgtcatactcattttgacgaacgtggattagggcatctggcactgggattatccaaagcaagcagagagccggttgctgttatcgttacttctggaaccgcggtggcaaatctctatccttcattaattgaagccagtttaaccggtgaacgaatggttttccttacggctgatcggccaccagaattgatggattgtggtgcaaatcaggctattcgtcaaaatggtatttttgcttctcatccatgccaaacaatttctttgccaagaccgaccgtagatataccggcaagctggctggcttctgtcatagatcatagtatggcgaatttgcaacatggagccgtgcatattaattgcccatttgccgaaccattatatggtaatgaagagcctgcttatgatgagtggcagcagcagttaggtgattggtggaaaagtaaaacaccttggttgagccagccagtcgctaaggttgtggcagaagttccggattgggactgctggcaacagaaaaaaggcgttgtattggctggtcgaatgagtgccgaagagggagttaatgttgctaaatgggcaaaggcattgagctggccgctgattggcaatgcgctttcacaaactgggcagccactgccttgtgccgatttatggttggataatcctcatgtgcaggagattttagcgcaagcgcaactggtagtgcagtttggctccagcctgatagggaaatgcttgttacagtggcaagcgaaatgccagccgcaggagttttggattattgatccgatacccggtcggcttgatcctgccaatcatcgtggcaaaaaattgacctgtcatattgctgactggttactggctcatccggcacagccgtgcataccgtgggcacaatcgtgtacattgtgggcagaagagctcatcgtttggtcagaaaaagccgttaactgcgtcagaactgaattggctgggaaattcggtgaagcaacggtggcctatcgattgcgtgaattactgcctgaacgtgggcagttgtttgtcggtaacagcctgattattcgtttgattgatacactgggacaattaccggcggggtatccagtttacagtaaccggggcgctagcggcattgatgggttaatttctactgcggcaggtgtacaacgggcaacggcaaagcccactttggctgtgatcggggatttatcggcgctttatgatctcaatagcttggctctgttgcgtcatccttccgctccaatggtattaattgtggtaaataataacggcgggcagattttctctttactacccacacaggaagaagcaaggcagcgtttttactgtatgcctcaatacgttaattttgatcatgctgcggcgatgttcggcttgaaatatgccagcccacaaaattggatggaattgcaacaaagtattaaacaggcatggcaacaaaatgaaaccacactgattgagttaaaagtgccggatagagaaggggctgagtgtttgcaacaactgttaaaacaggtggctatgttgtgagtctggtttgtcgcaagttcaacggttacaacgaccgcccttggctggtttggttgcatggattattgggctgtggtgatgaatggttgccgttagtgaatctgtgtgctcaacatccctcattggtcatcgatctgcccggtcacggtgattccactgacgtgcgggtaaaagatcttctggaaatgagttgtcttttatctgaaacattagcagaacagagaattagtcaatactggctgattggctactccttgggtggacgcattgctatgcatcatgcttgttatggtgatattcggggattatgtgggttactgattgaaggaggaaatcctgggttattttcccaacaggagcggaataatcgtcttgaacacgatagaaattgggccggacgttttcgttctcagccgattgaacaagttttatctgattggtatcaacagccggttttttctgatctattacctgaacaacgtcagcaactgatcaaagtacgccgtcataataatggcgatggtgtggctaatatgctggaaaatacctcacttggacatcaaccctggttagtgccggtattgcaacaattgacgttaccttttgtttatctgtgtggcgaaaatgataagaaattccaacatttggcaaaacgttgcgctttgccgctgcaaaccattccacgtgttgggcataatgctcaccgggcgaacgcagtggcgtttgccgcggtagtaaaccattttttatcactctttaataaggaatacgaatatgatttacccgagcgaagaagaactttattccccaattgtatggcaggactgctctgaagggtttgaagatattttttatcacaaatccaccgatggtatggctaaaatcaccatcaatcgcccgcaagtacgtaacgcattccgtccattgacggttaaagagatgatgcaggcgttggataatgcccgttatgatgacaatatcggtgtgattatcctgacgggtatgggtgaaaaagctttttgtgctggtggtgatcaaaaagtccgtggtgatcatggtggttataaggatgacaacggcatgcatcatctgaatgtcttggatttccagcgccaaattcgcacttgtccaaaacccgttgttgctatggttgctggatatgcgattggtggtggtcatgtactgcatttggtatgtgatctgaccattgcggctgataatgctattttcggtcagactgggcctaaagtgggctcttttgacggtggttggggggcatcttacatggcgcggattgttggtcagaaaaaggcccgtgaaatctggtttttgtgtcgtcaatatgatgctaaacaagcgttggaaatggggctggttaatacagttgtgccatatgtggatctggaaaaagagaccgttcgctggtgtcgtgagatgctgaaaaatagcccaatggccttgcgttgcttaaaagccgctctaaatgcggattgtgatggtcaatctggcttgcaagagctggcaggtaacgccaccatgcttttctatatgacagaagaaggtcaggagggacgtaatgcatttgttgagaaacgccatcctgatttcagtaaatttaaacgtaacccataatgcgtactgcaactttataccggttcagattgccaatggaggccggtgttatcctgcgatatcagcggcttaaaactcgtgatggttttttggttcacttacaggaaaatggtcaacagggatggggtgaaattgcaccattgccggaattcagcaaagaaacagttgaacaggcaggtgaagccgcggtggcatggcttagactgtggcatcttggcgctgaacctgatgaaagtgaattaccttctgttgcatttgggattagctgtgcattagctgaattacagggtaacttaccggaagaggctgattaccggaaagcgcccctgtgcaatggtgatcctgatgaactgattgttcgtctcaataacatgagtggacaaaaagttgccaaagtgaaaatcgggctgtacgaagcggtacgtgacggcatggtcgttaatgttctgctggaagcggtaccggatctatctttgcggctggatgctaaccgtagttggagccgcgctaaagcggacagtttcgctaagtatgtcaatcctgattaccgcaaccgaattgcctttttggaagaaccttgtcaaacctcacaacaatcgctcgcttttgcccgtgataccgggattgccattgcatgggatgaaagcgttcgtgatgaaggttttaacgtagaggcacaagcaggggtgacggctattgtgatcaaacccactctgacaggaagccttgcccgttgttgtcagttgatttcagccgcgcacaatgtgggattggaggcggtgatcagctccagtattgaaaccagcttcggtttgactcagcttgcccgtattgctcattggctgacgccagcgactattcctggactggatacgctggaattgattcagtctcagttggtgcgccgttggccgggtagcacgatgccagtaacaagattggacgagttagcaatcgcatggcgcagttaaatccattttcccagtggccgtggcgctactgggcagcgtttagccctgaaaatattgctgtcaagttgcgtgatcggtccctaacttggcatcaattagttatctctttggataccatagcggccaattttcgccaacagggggtagttgaaggtagtggcgtaatgttgcgaggaaagaacagcgaagagatgttgttttgttatcttgcggctttacagtgtggtgcgcgagtattgccactaaatcctcaattgcctgaaatgctcttggctgaattactgccacatttgaatatcgattttgtggctgatttctgtagtgataatgtgtctgtcatagatgccaaatcgcttaattggcaaagtgaaccactaaattctgctgataattcggtggaatgggatgctatgcgcccagccagtatgatactgacctccggctcttctggattgcctaaagcggctgttcactcaattcatgctcatcttgccagcgcgcaagatctactttcagtaattgaatttcagcaacgagatagctggttgctctcattgccgttgtttcatgtatcgggtcaagggatcatttggcgctggctaatcaaaggagcttctttagtgctcagaaatactcatctgttagatcacgctttagccgattgcacccatgcgtcattggttccgactcagctttggcggttactggaacagtcacaaaatcagtccctgaatttgaaacaagtgctgttgggtggagcaatgatccccattgaattgactcaaagggcggagcagcaaggtatttgctgttggtgtagctatggtttgaccgaattggcttcaacagtatgcattaaacgggcagacgatcttcccggtgtcggtaatcctttaccgggcaaagaaattcggctgataaatgaggaaattcagattcgttctggcagccttgccaatggatattggctggatggtaaattacaaccgttagctgatcgtgatggctggtttcatacccgtgatcgaggtgtgatacaaaatgatgagttgcggatacttggccggatggataatcaatttttcagcggtggagaagggattcagccggaagagattgaacgggtgattaacacctacccgcaggttgcacaaaactttattgttcccgtacctgaccctgaatttggttatcgtcctgtcgcggtcatagatagtcactccactgaagttatcgacttattaccggaatggttgattgataaactggctgcttttcagcgcccggtcgcttactatttgttacctcaaaagtttaaaaatagcggcattaaaatttcccgtcagcaaatcaaaaaatgggtgttggatttgccaagtttatattgagttattttgatttgttttcgtactgcccattatcactaatggagtcatgggcagagatggttaaaagacagtgttgttagtcattaccctttgatttttttcagcgcattttcaacaccagcgccatattctggatgaacttttctaaatagctcaacctgacggcgttgagtatcttcatgtgcttgtgacagttcactggcaatacggtcaaacatacgttgatgctctttactgtttattagcataaacagtttacgaggttgactgaaataatcttcatcttgacgatggttccagtgatcggcatctccttctaaagacaatgatgggtgtttgaattcaggttgttcctggaacaatcctgcattgtttggttcataagtcacggtgtttccgctgttaccatcgacacgcattgccccatcacggtggtaattatggaacggacaacgaggtgtattgaccggaatttgatggtggttaacgccaagacggtaacgttgagcatcaccataagagaacagacggccttgtaacatcttatcaggggagaaactgatacctggcacgacattagcagggttgaaagcagcctgttcaacatctgagaaatagttatcaggattacggtttagctcgaaataaccgacatcaatcattgggtagtcgccgtgaggccagactttggtcaaatcaaacgggttgtacggtaacaagttagcttctttctctggcatgatttggacttttaatttccagcgtggataatctccttgctcaattgctgcaaacaagtcacgttgagaactttcacgatctttacccaccagcgcttctgcttcttcgtccatcaggtttttaatgccttgctgacaacggaaatggaatttcacccagaaacgttcattatctgcgttgataaagctgaaagtatggctaccaaaaccgtgcatatggcggaaagacttaggtacaccacggtcactgaaatcaatcgttaattggtgcagtgattcaggttgatgagagaaaaaatcccacttataggcaggattacgtaagttagtgtggggatcgcgtttaacaacatggttaagatccgggaacttcagtggatcacggagatagaatatcggggtattgttgccgactaaatcccagtttccttcttccgtatagaacttgagcgcaaaaccacgaatatcacgttcagcatctgctgcgccgcgttcaccggcgacagttgagaaacgggcaaacatctcggtttttttgcctatttcagaaaaaatcttagcgcgagtgtacttagtaatatcgtgagtaaccacaaagacaccatgagctccagaacctttggcatgcatacggcgctctgggatcacttcacgatcaaaatgggcaagcttttctaagaaccaaacatcttgtaacaacataggaccacgttgacccgcagtcatgacattattgttgtcaacgacaggggtaccagcattcgttgtaagccctctctttttcatcacacttctcctgttttacatgaaaaaaaacagcggaatcgctgattaagaaaaacattctggtcaaatggcgaaatgcaaatattgtgtttttttataatttatttattattttcttgtttattgtttagaataaaactatttacataatcaattattaagcaaatgaaatgaaaaattcacacatatttagtaagtatagatgattcatttctttttgttgtctatcggtttagttgtatttacgtaagatgtttaacattaagtaaataaagaggaaatataatgaaggtttatcttgccgtggtagcgaccagtttgttgttcattgctgagtcagcgaatgcaatttccgtgaatgttcaggcgggtcgccatttcacccatacttctgcggcaattggtgataacagtgccggattatccttgaatggcaactgggcacgcagtgatcataacgggcagttgggaagtttgggaacagcatttagcctgcctgttggtccattgacggccagcatagggggtaaggctctctatttatcccctaaagatgggaaaaatggtgaggcattagccgcaggtgtaggtttgagttggactattatgcccgctttagcgctgtacggtgaagcttacggtgcgccatccagattaacttcgggtattgattcttatgttgaggctgcgggtggcttacgttttaccgtatttaaaccgttgacggtggatgctggttatcgggttatgaacatgagagggaaagagggaaatagggataacaaactggctgatggattttatatcggtgctggtttgaatttctaatttacttttgcgttttgtccgcaccattgctgatgcggacagttaattaacctacttctggcagtaaaccactgacaatacctatctggatggtaatgaccgtaattccgcaaagaaataccagaatcagaacgggttttccgccttttacccgataggctttttgttcaatttgacgactgcgccaagccagcatggaaggcagtaacagggcgagaatggacagtgcaactgcggcgaaagttaacgccataacaaagtttggatagtacaaggagcaaagtagtggtggaacaaaagtcatgatgccggtttgcaggcggcctgtcgcattattacggcgtttgaacagatctgccatatagtcaaacaaacctaaggagaccccaagaaatgaggttgccagtgccaaatcagcaaacagacggacagcaagctctacacgaggcgtcgcgacaacttctctcaccgcttttaacagtccattcagccctgattgctccgctaagatgccgacaaaagtatgggaagagatggcacccagagtggctaattgccataagatataggcagtcagtgggatagcactgccgataacaaatattttgcgtaacttacgggtatcacctcccatataattgacgatacttggcacactgccgtgaaaaccaaaagaggtgaataccacgggaatagctgataataccaaaccttgttccaaaggcattgacatcaagttagtgcttttgatgtggggcatcatgacggtcagcataataaccagaaagatgatttttgccgtaaatagcaggcggttaatcatatcgacagattgagtactgatagtgacaacacaacccgcgacaagagtgaaaatcagcacaccgtatgaaacaggaataggtttatccagccatgaagagaggctgcctgacagcaactcacctgcaccactgatataagcggttgtcagagcatacatgaggaaaagcatactgaaaccggtgagccattggcctcctcgcccaagataacgttttgccagcgttcccaggcccgtatcggccgggctgtattgataaacttccaccaacaataaagcggtatagctcatcaaaacccaaagagtgattaacatcacgaaggttgttccaaaaccgacaccggctgctgccagcggcatcgccagcattcctgcgccaattgtcgtgcccgctacgataaaaatactgccaagagtacgattcttcacgctttcccctagtttttgaactgattgaaatcgttatgaaaaggcaggctaaaggattaacttattcatgtcaaactacagttacacttagtgtaaataaataattacaattgtgtttttgcatgatcgtaaatgatgtatttcattaaatataaaaagttacttattctattaagtatttaaaaaaccagactttattcacacttaaataagaaagttttttattttcatctagattgctaattaaaataagacgttattcattatcttaacaattaacgtatggtgaaataaaaattatcaatggaaagaatatctgtttgttttaggacattagttgtatctgttctattcgctatatcggggcaagcttatgcttcagcgtttattggcccggcggatcaagaggttatcactcaacaacagaaagcgttattgcagcaggctcaacagcagcgggaggcgttacgtaacaacatcactttgtctccagctttagagcacgaaactgatggtgctaaatctgtttgtcataccatccgctatattcaatttgaaggtgttgagagcctttcccaatcagtaagggaaaagttaatacagtcttatttatcccgttgcttaaccttgccagatattaatgaactggtgcgtaaagtatcgaatgcctatatcgagcgaggttatgtcacttctcgggctggactcagagcacaggatttatccaccggtacgctcattattaccgtgagtgagggcaaagttgaatcaatcactcttgatggtgagacatccctttcattgaaaatggcctttccgggaatggttggtaagacattgaatctacgggatattgaacaggggatggaacaactgaaccggcttccttcccaacagataaccattgatattcagccgggaaaacagcccggttattctgcggttatcttaaaacgaatatcgactcgtttgccggttggtgccagtttggggatagataatagtggtcaaaaaagtactggcaccgggcaaatcaacgccagtgtgaatgtagataacctattacatcttgcagaccaatggtcattatctgtcagtcgcaacaacgattttcgtaataaccaccgtagtcgaagtctctcttccaatgtgacgattccttatggtgactggttgttcaattatcaatatgcgtggaacgattcttttcaggatattccgattggcttacaaagttaccgttatgaaggtgacaaccagactcaccggctagcaataaaccggacgttgtatcgtgacggtgaacagaaactggctctgaatgcaggaataacacatcgtcagacggctaatttgtttgcaggaaagaaattatctatcagcagtccgatattaagtgttgctaatcttggtcttaattacagttcggtactggcgggtggctatatcactttcaaccctgcattgagttatgggttacccgtgttaggtgcaacaaaagatgacccgtatttcccagatgctccacgtagccaattccgtaaattcagcctgagtgttagctattttatcccgatttccgactctatttattacctttcatctgtttacggtcaaaccacaccgtacaacctttatgccagtgaacgtctctcattaggcgggcaatactctgttcggggatttaaagaacaatacctgaccggaaatcgcggtgggtattggcgtaatgaactgaattggcaaatttcagagttgcctgtgctgggtgaactggccttaacgggggcgctggatacgggttggttacagggaaaaaccagacaaatcgatggcggtaatgttaccggtactgcgcttggcatatcactgacgcacagtaagttcaatcaaacaatgacattgggaacacctctgatttatccagaccacctgaaaccggataactgggtagtttactggtctgtatcactgattttttagcgatgtaatacaggtatttatatcaataactttgtacttaaattaagaaaggacagaataatggaaagacgtaacggccctatggcaaggggagcttgttatcttttaatttatcttactgccgtatatccccttcatcctgctattgcagccgggatcacgccagataataaccgaacacaggtacaaaaccagggtaatgtgccgattgtaaatattgctacgcctaatggtgcaggaatatctcacaacacttataaagagtttaatgttgcgactcagggtgccgtattaaataacgccactcaggtggttaaatcacaattagccgggcaacttaacgctaaccctaacttgaatggtaaatcggctgaattgattattaatgaagtcaccggtagtggtcgatctgatctccaagggaaactagagatagttggtcataaagccaatatgatgattgccaaccctaatggcattacttgtgatggttgtggttttatcaataccggcagtgcgacattgaccaccggtaaacctcaatttgataaacagggtgcgttggaagcattggaggttaaaaaaggccagattactattggtggcaaagggctggatggtaagacaacggattatatcgatattatcagccgggcgactgaattaaatggaaaaattcaagctaataatttatccctgacgcagggagctaatcggattgattttaacgatggcacagtgaaaaaaatcactggagaaggtgttaaacctcaattagccgttgataccaaagcattaggcggcatgtatgccaataaaatccgtttggttgctacggaagatggtgtcggtgttaatcttaaggatttaatcagcaatcagcgtgatattaccttaaacgttaatggcaaaattgagctgggaaatgccaaagccaaaacggattttaatcttagcgctaaagagactcatattgcgcaaaatatcaaggtacaagcggaacgggatattactctggcaagtactaaattggataataaagggagtgtaactgcgggccgggatatgcggatatttggtgataccttgcgtaataccggtgataaagcacttttgcaagccaataataatatgtggttacagaaggatgctcaggggaataagagcgatctgattgaaaacaagtctgcaacgataaagactgtgaaaggggatttggttgttcgcactgataaactggataatataagagatcaaaccataactgaatggaaaaccattccggctgactccgtaggaattaataaatgggctggtagtttttatggtatcaggcaaggtgttgattccgtcattacattggctgtaaaattgaaagattttaatcgggataaatggtttggtattatcgatttattaaagaataactttgtcaatattaaacaggatagattttcaataaaggcgataagcccagcagggagcattgtttctggtggtaatgcttatattaatgcaactaatttgcgaaatgatgtttcatctatatatgcgaaaaaagatcttattctcaccggggaaaatattgatattatcagccgtcaattaggtaagaaaaatacattttggcattatactacatcaaaccctatggctggcagtgaattcaaagatgatgatgcaccaccgggtgattgggatttattttatgtttatgaagatgcagaatatactaagcaaggagagttatatacttggggggaagaaagttatatatcgtcttcaattagtgcggaaaaaaatctagtagcggattttaaaaacaatttaaatatcagtacgttgattcctgataatgcaaaaaatctgtcagaagtaactgtaactgcccgacctgacacattatcagcaaaaaacattttgcttcacgcaggtaaaatcaatatcactgataaactaaaggctattgatgggttaaatattatttccgagaatgatattaatcttaataatgcagcattgatttcgtcaaatagcttatctatgacagcaactaataatattaatgctttgcaaggtgaactaaaagccaaagatgtaactattatcagccgcaacgggaatgttcagtttcagagtagtagcaaaccagggtattttaatcctgataatacgcgtaaaataagtagcttagaagctacgggtgatttactcttacatgcaggtaagaacattcttcttcgcaatatcctcttaacgaaaagtcataatatttctttaactgcaaatcatgatattaccattgataataacagtgagttattgacacataaacgaatgggggatgtgagcgctgagagtaaggaacaaacgctgtttaatcagatgttatctacaataggtaagcttgatgcaaaaagctcggttgtcattaatgctggaggaaatttatttattaagggagttaatgtttcagcggtaaaagatatcaacttgaccgctgcaaaaaacattgatctcactcctcgtgaattatctccttcactgaataaactattttccacatcccgttctggtgaattaagtagccgattaaccgcaggaaataatatcaatattatcagtggtgccgatatcaatggcaaggcggctcaaattaacgcgaaaggtaatacattattatcagcaggtcggaatattaacttgttagctctgggctattccgctattgataataagaacgataataataaagatgatcgccatatcgttgctgtagttaatggtggaaaacagcttaccttagctgctaatggaacgctgattacccaaggcgctacattaagctcaggaggaaatacaacgatttcttccggcggcaatatgcgttttgaatcagtgcagaatcactcttaccgggaaaaaggcagggaattcactgaatcagtcacacagcaaggtactgcattgactagtggcggtatattaactgttatttcaaacggcagtattcttttccaagccactaaactgactgccaaaggtgcgatggacgtcgcggcgaaaggcggttatctgtacgctcaggcaatggaagaatctagccactatgagaaaacagaaaccaaacgtaagtggtatggcaaaaagaaaaccattaaacgtacccgtcatgatgtcactaataaagtcactgaatttactgcgggtggtgatattaacctgttaagccgggatgatagcacttacgaagccagtaaaattgcgactaataaaaacgccaaactgaccagcactcacggtaaagttaattttaaagcagtaaaaaataccgcttttgaacagactattacctattccaaaggcttttatattaagcaaagggataaaggttataccgaaacccaatgggtattaccgcagattttcactggtggaaaactgacagtggaagcagccaacggtgttagtgctgatattaaagctaaaaatggtcagtcattgcaaaatgtattagccgtattgggaaatacgccagaaacagcttggttgaaagggcttcgagaaaataaagatatccagtggaatgtggtcaaagacgcttatgacagttgggatcacaagagccagcatttgaatccagtggtttctgcggtaattgcgattgcagcggcggcggcaaccgcaggcagttctttagcggcatctgtcgcatcttatgcgggtaatagcgttgcgggtggggcgttaactgcgggaatgtcatcactggcggcacaggcggcggttgctattgtggataatcagggggacatatccaaagcgctaaaagtattaggtagcagtgatgcggttaaatcaacaattacctcaatggcgattggtggcgcattggccggatttgattcctacatgggatgggataaagcggctgatggtaccaaattagatcccacaaaagcgaaattaccccaaatcagcaatggtgattggaataaagtcgtccaacgggtagcgggtcaatccattattagttctagcttgaataccgccattaacggcggcagctttaaagataatttgactacggctctgttggctaatattggcagccagattaatgcggaaggtgccagattaattggtgacaacggcgaagtgcttggagtgccgggtaaaacgttaagccatgcagttgtcgcagggataagcgctgaaattggcagaggaaatgttaaaggcgcaatggcaggggctttggctgcggaattggctggttctattatggataatagcttgtttgagcctaaatttcgtgatgaatcagaacgtcagttaaataagctaataaaggctatgtctgataatgaatctaatgcccagctagcaaaagtttttggttcagtagcgggagcaatagtaacaggaacgccggatggtgcttacagtggtgcaaatgcatctgagatagtttttcgttataactatattgatcatcagcttactcagttagcgttagaaaaccaaaaagatatgttggctgcaatggaaggtgataaagaggctttaattcgtgtggaagctcgtcaacaagctgcgttagcagttatggattacatccctgtcattggcgcaacgaaaggattttatgatgcagagaaattggaagattatcttcttgctacgctcagtgttattcctagtgggaagttatcagtaaaaatcattgaaaaacttaaagttgcggttaaagctaaaaatgcccctgaaacaaggatattgttgaatgaaattaagcgtgatattagtaagtcaggaacagtatgggattctataaaagcaacacagcctgcaattcctggaacatcaataccaaaatcgtttgagatgacggtaaatggaaaagttgtatgggttaacccaaatgcaaccaagcatatggaggaatatctaacgcgtaatggattgtcacacagcacaacagaagggagccaagctatgttgtcaagtcttcaacatgcgatcaagaatgcatcatctcaaggtttgaagtttaatgaaaaaatgcaagtaggtcgttgggagttaatatttagtcagcgatctacagatccttatccagtattaaaacatgcgttgtataaataatgatgctgaaaataatcaagccagtaaatgatcaggaagtaatcattaatattgatggttacacacctattgatatccaattagttgataatataaacgaaactcctttatattggagagttggtgatgataagaagagtttattagagtttgctattttgcctagtaatggcagaattgcagcgattactttggttataattaatccagagtttattcaatatgcagatgattatcttattgaatcatatgaaagtaaatgtggttttcctatagttgatgtgaatatatggagatttactgaaaataatgattttaatcatcgttttatcgatgaattcaattgtgtgattaaagcattgatttatcaagaatctataatgttggtcataaaagagaaatgtatgttatccagttggattaaatgtagcaactctttgtggttgggattggacgatgatgaaaatattgtaagtgttctaataagaggattatcaaaagaagatatcaataatttctttaattctattagttagtgtatatcaagctaattttatcttggattgatatgcgatattgctatgtagtaaaaatgggtaacatcggtttccataccgatgttaccaaatatatatttttttattaccttagatagtctttgtgttgtattaggaaattttttactgcttactggatctatccaatggagtcttgcgattgaaatagtatgggtatccttttgaggattttgttgctacgcaaatgccagcaggttctcggttgcctgaaaggtttaagacttttgatttttatgatgaaaaaacaggtttggctaccagtgtaaaaacattggatacacgtactgcttcaaaaattaaaaatccaaaacaactgtatatttccataaaaggaaatattgatgataccattcgtttcattgatgaaacaaaagcaggtgtaaatgtcactgctaacatgatatctaagcgtgaagtgagaattgcaatacctaaaactaccactcctgaccaatgggagcaaatcaaccgagccattacttatggtgcagagaaaaatgtaagtgtcaaaattacggtggtgaaataatgagtgagatttttaaacgatggcggaatgccagatgtgtatttaatggtgatttttattcaataataagttattcgggttatcgttcactgaatttagaccttttagggggtaaccatatgttatctcctgatatttctgatgaggagctaggcattgtaattctggatgctctttctaaaagtcggctgattgatcccgatgataatttttttgacaatgaaaaaaaggctgagagatataaagaatgggttaaactcttaatggaaacttacaattattgttcaaaacgtcagctttttaaaaaaatgcataattgtggaatccaattgcttgatggccaaataacgataagaccatctagccatgaaaaattggaaggttggtctggagatggtatttctgtagctgattatgtcgtgattccggcagacagttctcctgaggaagttggagcagcattacggctagctttttcacgttgcagaagttatgtttgacgataaatgaacagttgtttttgcactaaattgatcatgatctttgatttatagagttaattaaggtggacacgtagtagttattatgtgtccactaattatctcgaaaagattcaaatagttattaaataagccttactgctaaaattacggtggtgaaataatgaatgcagattttaaacaagggttaaatgcaagcgctatgttcaacggggatttttattctgttaaaacttattcaggcaatggtttattgagagcggatcccttaggtagcaaacatttactacagccaattgtatctgatcaagaattaggaaaggctgcacttgatgctttatcaaaaagcagagtaatcccacttgatgaatgtgaggattattttgatcatgatgcaagtgatgagcagtataaaaattggataacggagatgatgaaatcttatggctatcgttcaaaacgccgattatttaagaaaatgttgagttgtagtatttgcatgcttgatggtgagataacgatacaaccatctagccatgaaaaattggaaggttggtctggagatggtatttctgaagctgattatgtcgtgattccggcagacagttcccctgaggaagttggtgcggcactacggctggctttttcacgttgcagaagttatgtttgacgataaggtaacagtttgtttttgcattgattattcatgatttttgatttagagagttaattaaggtggacacgtagtagttattatgtgtccactaattatctcgaaaagattcaaatagttattaaataagccttactgctaaaattacggtggtgaaataatgaatgcagattttaaacaagggttaaatgcaagagttaaatttaatggtgatttctattcagtacaaacctattcaggcaatggcttattgggagcagatccctcaggaagtaattatttattacagccaattgtatctgatcaagagttgggaaaggctgtgcttgatgctttatcaaaaagcagagtaatcccgctggataagtacggggattattttgatcatgatgtaaatgctgaacagtataaaaattggatcaccgagatgatgggatcttataattaccgttcaaaacggcagttatttaagaaaatgttaagctgtggtatctgtatgcttgatggtcaaataacgatccgaccatcctgccatgagaaattggagggttggtctgaagatggtatttctgaagctgattatgtcattattccggcagacagttctcctgcggaagttggtgcggcattacggctggctttttcgcgttgtagaagttatgtttgattaaagaacctaagttttatttcgtaactgatcatagcaatatctattatataaaatcatcaatagacagaatatatagtattatttggtcaagaataaatattatgaatagtaaaactgttttagttgataaaaatggtaataaaaagaagttaataaagtcttttagaccatttattaacttccgatatttttaatgaactcatatatatttggtttttattttcctctaaaaactaatttattcatttttatattgtaaataattattaattctatagtcttttaatacttggtctattacccaactggttcgtgagcctgattctcctgttgatgggcaaaatccttttccttgtaattcattaattattgtattaatcaatggcatttctatatgctttggattatcaatattaaattggtgtaatttattattttcgtcataatatgaaatggctgaatttccaaatgtagagaaagatatttttcctttagtaccaattatttcaacattatctcctctagagttcgacacaaaattccatatacccacaccttgaatattattttcaaacataaatgacattgatacacaatcttcagcgggataagcattcccttgtgaatttgcatgtcctttgacagaaataatctttcccaaaagaaagtctaatatatcaagagtatgacatgctaaatcaacaaataacccaccaccggaaatttttggattaacaacccaaggtaaatgatgaggatcttggtaacatttctctatctctctgtaaagtatacaacttacaattcttggtgttcctatcgcacctgactcaattaattctttgatctttaaaaatcttggtaatgctctcctataataagccacaaataagggaacattttgggatttacaaatcgcgatcatctcattacattcttcgaatgttaatgccataggtttttctacatatattgctttaccagctttagccgctaaaatggtatattctttatgtgtagagggaggtgttgcaatatatactgcatcaatgtctttgtcattaataagtgaattagcgtcagaataccatttagggacattatgtctcttagcaaaatcctctgctaaattagcgttgcgccgcattactgcaactaattcagaattatctaatttataaaaggcagggccactttttacttcagtaacatcaccgcaaccaataatgccccattttattgtttttttcattttattttcccaatatgtttatatcgaattctttcttaataaaatcttggtggagattataatagaattctgatttatcccatttttttcgttccaatatatgattatataacatgttttttacttctgaatcaaatgttaatgccataggtttttctacatatattgctttgccagctttacctgatttagccgctgatttctttccaactctttgctaatgggttttgattgaatgcaattagctctctttctatcccacatgcttgcagccatgattgcaataatatatattgattgcaatgcatgctaaatgaggaaatgaatctatgccatccattactgtcagaaatgtaccggacgaagtgcatcgtgccttgcgggtacgcgcagccacacatggccgtagtgctgaggccgaaatccggtttattctggaaaacgccgtacaaccggaggggcgcatcaagctgggttccttgctggcaaaaatcggccgcgaggcggagggcgtcgatcttgagatcgagcgtgataagacacctgctgagccgatgagttttgaatgatactgctagatacgaacgtggtttccgagccactgcggctcagcggccaccccgctgtggttgcctggatagatgaacagaatgtcgagacgctttacttggcagcgatcagcttggctgagcttcgctttggggttgcagcgctgtccaatggtaagcgcaaagataccctgcatagaaacctagagcggagtgttgttcctttatttaccggtcgtatcttgccattcgatgcggccgcttcggaagcttatgccgagatcatggcgcgagcgaagagcgaggggaaagccattgggaaggctgacgggtatattgcggctattgcagcggcgaatgggctgattgttgcaacccgcgacatatcaccttttgaagctgccgggcttactgttatcaacccttggaagggctaataacaactatacccgtcatctttcaagttgcttctttgttggctgcacttgctcaccccggtcacatagttatctatgctcccggggattcactcccttgccgccgcgatgcatcttgaaatcaatagggtatatatcaacattgaaggtggtaaggatatgaagaggcaagtgaaaacaatggctctcccagcgatgacagcggcgttattggcgtctctggctcctgttccggctaaaagtaccgttctaccgatgacggttgttgaaatacaaaaatcagcaggtttgatatctacattgacatttaacctgaaagatgaacaagtttttctgcctttgtcagaagcaactgcttacttgcaaagtctgaatgagtacacacgaaagtcgttatctgaagctatcgctcatcgtattgctaaggggagtggtggattgttttcaaattcagtacgtataagaaaattggccaatgacaacattgaatattgcatgaggataaaagaagcagtacgtatcgttctgtcacctgataatctgagtaagaattttccagatccgtctgagcgagaaatatttcgggtgaatattgtaaagtttggtcgagcaatagcgaactctgaatatactgcgtgtgatattctttcggctattgaacaaagcctgcctccgacaaagacgtatcatcctgataatttacctacttctagagaagttaaattgatgatattagcagaacataaaaaccttggtctgtcagagccggaatttttataatgggagtcagtgttactgttcataaagatgttgagtttcatgatgttgcaatagtttatgcaaagttgttagagcattggaaaaggacggcgttattaccttctgtatttggccgggatggtcaatgggaacataatagcagaaccttagattcaaatatctataaattgcatattagaatgccagatgaaataccgtgggaaaaatataagccacagattgatcgatgttcggataattatttagtgtatgtgcagcattggatggatagtaagagttttcaggtgataagtattatgagcccgaaggctcacgaattagcaaaaacgtcatttcttacagagcttgagcgtagggttgaggagttccattccatctaaattactatataacctgttgttaataaattaaaagcccttataaatttggggattctttgtccatgcgatcaaggtgtggatattcgtattcattattgagtgttagtttttaaaataaatactaaagctcaatctcaatatcactaagcggatgacagcagcagggtaaaatttcgccttcattaacaaaagccagaggtttgcgtcgatagccgactttgccttttatcaatttgacacgacaggaaccgcaataaccttcgcggcattggtattcagcttgaactctaccttgttccaatgcctctagcagactgttatgcagttcgggagagctgtagatatgataaccctgcataccatgcagggttactttatagcttgtcatcagagttcaaaatcactcaggtcgtcagggttaacttcagcatcaatctgaccaaccagataggaactgacttcaacttcttgcggcgcgacttgaacgttatcagacaccagccaggcgttaatccacggaatcgggttagaacgcgtttcaaatggcagtttcaacccgacagcttgcatacggatgttagtaatgtactcaacatattggcacagaatatctttgttcaagccaatcatcgagccttcgctgaacaggtaatctgcccactctttttcttgttccgccgcctgaacaaacaggtcgtagcactgttgttcacactctttggcgatttctgccatttctggatcgtcttgaccagagcgcagcagattcagcatatgttgtgtgccggtcagatgtagtgcttcgtcacgggcgatcaatttgatgatttttgcattaccttccatcaattcgcgttcagcaaaggcaaatgaacaggcaaaactgacgtaaaagcggatcgcttccagcgcgttaacgctcatcaggcacaggtacagttgctttttcagtccacgcaggctagccgtgatggttttaccggcaatctgatgtgtgccttcaccaaatagctgataatgattggtcatctcaatcagatcatcgtaataagcggaaatgtcttttgcccgtttcagaatctcttcattggtgacaatatcatcaaacacaaccgccggatcattaacgatattccgaatgatgtgagtgtaagaacgtgaatgaatcgtttcagaaaaagaccaagtttcaacccaggtttccagctcagggatggagatcaagggcagaaaagccacgttcgggctgcggccctgaatagagtccagcagcgtttgatattttaagttactgataaaaatatgcttttcatggtcaggcagcgcattgtagtcaatgcggtcgcgagacacgtcaacttcttccgggcgccagaagaaagagagctgtttttcgatcaatttctcgaaaatcggatacttttgttggtcataacgggctacatttactggctgaccaaaaaacatgggttcctgtaactgatcgtttttgacttgtgaaaaagtggtataggccataacttcctcaaattaaatcttacacgcgccgccttcacaatcggaatcagcagattccacgacttcttccaggtcatcctgaatgtcttccgcaccatcacgggtattgtggtaatacaacgtcttcacaccatatttgtaagcgagcaataaatctttcagtagctgattcatcggcacttttccacttgggaaatgtgtcggatcgtagttggtattggcagagatcgattgatcgataaatttctgcatgataccaaccaactgcaaatagccatcattaccaggcatttgccataagagttcataagcacctttcagacgctcatattccggtacaacctggcgtaaaatgccatcttttgatgctttgatgctgacataaccacgaggcggttcaatgccgttggtggcgttagagatctgggaagaggtctctgacggcatcaaagaagataatgttgaattgcgcagaccatattgtttgatctcgttgcgcaatgcttcccagtcatagtgcagcggttcattggtcaatgtgtccagcgcttttttataggtatcgatagggaggatacctttagaataggtggtttctttaaaccacgggcaagcgccttgttctttcgccagttcattagaggctttcaacaggtaatactggatagcttcaaatgttttgtgggtcaggttgttagcgctgccatcggagtaacgtacaccgtgtttcgccagatagtaagcatagttgatgacaccaatgcctaatgtacggcgacccattgccccttgtttggcggcaaggatagggtagtcctgataatcgagcagggcatcaagggcacggactgccagagtagccagttcttccagctcatcaagattttcaattgcccccagattgaatgcggataaggtacacagcgcgatttcaccatttttatcattgatatcattcaatggcttggttggcagtgcaatttccagacacagatttgattggcgcaccggggcgactaaaggatcaaatgggctgtgggtgttgcagtgatctacgttctgaatatagatacggccggtagaagcacgctcttgcatcatcagggagaagagatcaaccgctttcagacgttgctgacggatattgctgtcctgctcatatttggtgtacaagcgctcaaattcatcctgatcggcaaagaatgcctcatatagccctggaacgtcggatgggctgaacagggtaatctcttcacctttgatcaggcgttcgtacatcagtttgttaagttgtacgccatagtccatgtgacgaacacggtttccttcaacgccacggttgttttttagtaccagcaggctttcaacttccagatgccataatggatagaacagggtagcggcaccaccacgaacgcccccctgagagcaggatttgaccgcggtctggaaatgcttataaaaaggaatacagccggtatggaaggcttcaccattacggattgggcttcccagcgcacgaatgcggcctgcattgataccaatacccgcacgttgagaaacatattttacaatcgcgctggaagtcgcattaatggaatccaggctatcatcacattcaatcaatacgcatgagctaaattgacgcgtcggggtgcgtacacctgccatgatcggggtcggcagagagatcttaaatgtggaagccgcatcgtaaaaacggcgaatatagtccagacgtgtctctttcggataaccggagaacaggcaagctgcgaccagaatatagaggaattgggcactttcataaatttcaccggtaacgcgattctgaaccaggtatttaccttcaagctgtttgaccgccgcgtaagaaaagttcatatcacgccaatggtcaataaactcgttcatttgctcgaattcttctttcgagtagtctgcaagcaagtgcttgtcatatttgcccattttcaccatacgggatacatggtcatagagcgagggtggctcgaattgaccgtaagcttttttacgcaggttgaaaattgccaagcgggcggccagatactgatagtcaggtgcatcaccggagataagatcagcggaagctttgatcatcgtctcatgaatatctgaggttttgatgccatcgtaaaattggatttgggaacgcagttctacttgtgataccgagacatttttcagtccatcggctgcccagttaacaacccggtggattttatcaaggtcaattcgttctttgtggccatcacgctttgttactagcagactatggttcatggacaggcataccttacatttactttcagattcactcccacctgctttgtgtctttgacttagaccaaaacataaccccctcagtggcggaaaaaccaacgagagagtagtggtaatggaatgttaaggaacacaatatgtagggggtacactaaataatgacaacaagataatgttaaaagcagcttttatcaagtgtacaaaaatacggattcttgtggataacttgaggactaaaatttattaaaaagccggaagcctgcatcattactagcggttgctctgacaaaaacaccggcaaaaatgagtaaaaaaattcctgaaaatgtgatttatttgccgctttattagtctgtcagatgaatatgtcagacatactgactgtgtaacatataattgacgtctacattgtgaccaaggctaaatttatccgttagcgggttataatgtaggccgataatatgcttttcccgcaaggatgttctgtcaatccagcctatcaactctgatggccggataaatttcttcgcatcatgggttcccttcggtaccatttttaggatgtattccgcgccgattaccgccataagccaggcttttttgttgcggttaatggtagagaaaaagacgtgtccgccgggtttcaccaactgagcacaagcgtgaacgaccgattgtggatctgggacatgttccagcatttccatacaggtgacgatatcataagcttgtggatatttttcggcgtggctttctactgtttcctgtacataggtcacggggatacctgtttcaagggcgtgcagtctggcaacctgaagtggttccgtacccatatccagcccggtcacatcagccccttcacgggccatactttctgacaaaataccgccaccacagcctacatccaacacttttttaccgaaaataccgccagaacgctgcaaaatataattcaggcgtagtgggttaatccggtgcagtggctgaaattcaccttccaaatcccaccagcgagaagcgatcgcttcaaatttttctatttcctgttgatcaacattgtttggggtggaaggggttttgatgttcatcagtggttattgctccttaaactttctttaaacaggcggattcactcagttctgccaaggttcattcagttctgagtcagttttgaatcagttttgaatcagttttgaaatagtatacacggcttaatttttaaatacccgtatctgatttttataaaactgttgggttgtggtatagttctaaacctttgaattcggaatgtatgaggaatagtgggctccatgagcgacattgccagagaaatcaccccggtcaatatcgaagaagagctgaaaagctcgtatttggattatgcgatgtctgttattgttgggcgcgcactaccagatgttcgagacggactaaagccggtacaccgtcgcgtgctttatgccatgagtgtactgggaaatgattggaataaaccctacaaaaagtctgcccgtgttgtcggggacgtcatcggtaaataccacccacatggggatagtgcagtctacgacacgattgttcgtatggctcagccattttccctgcgctatatgttggttgatggtcagggtaactttgggtcagttgatggtgactcagccgccgctatgcgttacaccgaagtgcgtatggcgaaagttgcccatgagctgctagcggatctggaaaaagagactgtcgattttgtgccaaactatgatggtacagaacagatcccggaagtgatgccaacgaaagtaccaaacctgctgatcaacggttcttccggtatcgcagtgggtatggcaactaacattcctcctcataacttatccgaagttattgatggttgtctggcttatattgaagatgaaaacatcagcattgaagggttgatgcagtatattcctggcccggatttccctactgctgcgattattaatggtcgtcgcggtattcaggaggcttatcggactggtcgcggtaaaatttatatccgtgcccgtgcggaaattgaagtggatgagaagaatggtcgtgaaactattttagtgcacgagattccttatcaggtcaataaagcccgtctgattgaaaaaattgccgaattggtgaaagaaaaacgcatcgaaggggttagtgcacttcgtgacgaatctgataaagacggcatgcggattgtgattgaagtgaaacgggatgcggtgggagaagtggttctgaataacctctattctttgactcaactccaggtttcttttggtatcaacatggtggccctgcatcaagggcagccgaagctgctgaatctgaaagatattatttcggccttcgtatgccaccgccgtgaggtagtcacccgtcgtactatctttgaattacgtaaagcccgtgaacgagctcatattcttgaagcattggctgtggcattggcgaatatcgatccgattatcgaacttatccgttttgcatcgacgccagccgaggcaaaagctgcattagttgctcagccgtgggaattaggtagtgttgccaccatgttagaacgtgccggcgatgatgctgcccgccctgaatggctggaatcacaatatggcgtgcatgagggtaaatattatctgactgaacaacaggctcaggcgattctggatctgcgtttgcagaaactgactggtttggagcatgaaaaactgctggatgaatatcgtgaattgctgacattaatcggcgaattgctgttcattttggaaaatcctgagcgcttgatggaagtgatccgtgaagagttgttggcaattaaggcgcaatacagcgatgcccgccgtactgaaatcacggaaaatacggctgatatcaatattgaagatttgattaatcaggaagatgttgttgttacgctgtcacatcaagggtatgtcaaatatcagccgttatctgactatgaagcgcagcgccgtggtggtaaaggtaaatccgcagcgcgtattaaagaagaagattttattgacaagttgttggttgccaatacccacgatacgatcctctgcttctccagccgtggccgcttgtactggatgaaggtttatcaattaccggaggctagccgtggtgcccgtggtcgtccgattgttaacctgttgccgttagagcaaaatgagcgaattacggcgattctgccggtgcgtgaatatgaagaagggttatatgtctttatggctaccgccagtgggaccgtgaagaaaaccgcgttgcaagatttcagccgtccgcgcagtgcgggcattctcgccgttaatcttaatgatggtgatgagctgatcggcgttgacctgactgacggtagtaacgaagttatgttgttctccgcggaagggaaggttgttcgttttgcagaagaagcggttcgttcaatggggcgtaccgctaccggtgtacgtggtattaaactaaatggtgaagataaagttgtttctctgattatcccgcgtggagaaggagaaattctgacggtcactgaaaacggttatggcaaacgcaccgctgaaaacgaatatccgatcaaatcccgtgcaacgcagggggttatctcaattaaagtcagtgagcgtaatggtaacgtgatcggggcaattcaggttgaaccaaccgatcaaataatgatgattacggatgctggcacattagtacgtacaagggtgtcggaagtcagcgttgttggccggaatactcaaggcgtaacacttattcgtaccgctgaagatgagaaagttgtcggcttacagcgggttgctgagcccgaagatgatgaagacgatgaagatgggttggcagcagaaggggaagaggtgaaaagtgatagcaccgatttacctgatgctaacagcagcgagtcagttgatccggtttaagtgaagatattttttcacttaatttaagaaacaggtacttcggtgcctgtttttttacagggatttttattaatatcgaaatatgcaacagatgggcctttttaatcgttaaactctggataccctatggatttcaagatgcatcgcgacggcaagggagtgaatccccgggagcataggtaactatgtgaccggggtgagcgagtgcagccaacaaagaggcaacttgaaggataacgggtatatatcttgtcattaatgacattgaataatgctggtttttatcaggtaaccttttgagatatctttcttcttttcgtacatcgctgaaaatatcccgttatcttttccgggtgcttggcttaatgttgtgggcattgggcgctttattaacagctttttacctggttaatatctttaatgaagttaaatcagatattcggcaagaatacaatgctaattatgattccacgctctcttatgtgcgtcatacagcaagtgttctgcgggatatccaatatatgacagaaaagcatttactgaattctaatggaaaaaatgctatttttgattttccacataataacccggcgttttcttatcatccgttgaaccaaaacgctgattgtcatacttttcgcaacaacactcatagttatttaaattcattaaataatcttatcttctattggaaggataatcttgctgcgcctcaggggttgaatcaggtttttctggtgggtacgcaaagtatgtgtatggtaagtttttctatccgtaataccacgactgaacccgatacgttgaaaaaaatagtttatgaaaattcacgtaggcttatcagcctgaaagaacaaggtaaagaacgaaatgtttattgggttataccgggtgcaagatctgatagcggccatctctacgtgttggctccggtatatgtcaatggtcagatggttgccatgataggcattgaacaattcatcagattggactcttttattcagagacaagaccgcccaatttcaataacgttattgaatagcagtaatcacccggtgttgcattatccagcaaatgatgactataaacttcattatgctgattatcagttggaagcgccttattttggctatgatgataattttactgatttactgctaaaacgtcggttaatgccatcttcattcagtatcatttatgccctgtcactgaaaactatttttgaaggttttaagctacagattattagcagtattgtgcttaatgcattatctgcctttgtcatcattatcttggtgtatctgtttgagcggaaaatgtttgttccggcagaagagaatgccatccgcctggaagagcatgagcaatttaatcataaaattgtggcttcagcgccggttgggatcagtatattgcgggtcagtgatgggagtaatattctgagtaatgagttggcacataattatttgagaatgctaacgcacgaagatcgggaacggattattcatattatttgtgacagaaccagtagttatgttgatgttgtcaccagtaatcatcatcatttgcaaatcagttttgttcattcccgctacaggaatgaagaggtggcaatttgtgtcttggttgatattagtgtccgtgtgcggatggaaaaatcattacaggaaatggcgttagcatcagagcaggctaactattctaaatctatgtttttagctaccgtcagccacgagttgagaacgccgctttacggtattattggcaacctggagttattacaagcacattcattgcctgctgaatctgtccgtttgttatcaacgatgaataactcctcagcgctgttgctaaaaattatcagtgatattctcgacttttcaaagatcgaatctaaacagcttaaaattgaatctagagaattttcctgtcaggaagttatctctcatgttatttctaactatctaccgttagtagtgaaaaagccattgaccttgtattgctatattgaaccgggtgttccagattatatctgcaatgatccggttcgattacaacaagttatatctaatctgttaaataatgcgattaaattcactgataccggatgtgtgattatccatgtgacagttgataaagattacttatacgtcagaataaaggacacgggtgtcggtatctctgataaagcgcttattcagttgtttgatccctttttccagatcatgccaaatacggaaagctcatctcagggaaccgggcttggtctggcgatttgtgaaaaacttatcaatctgatggatggtgatattgaagtcatttcccaaccacagatagggagtatgttttctattcggttacctttatatggtgcgaaatataggccaaaaactcagctaataaatgagtctcagcggaaaatcatcttggctatacgcaatctttatctggaagaatttttacagcgttttctggttcatcatggcttacacacggttttatacagtgagcagaacacagagggtagtgaaattattatcagcgattttcctgatgcggttatttcccctgtatatgcttatattgaattatcgacggactatattggctcaccggaacaaatcagagaaaactattggttacataacacttaccatttacatgatttgtcggtaatgattgagcggctgatttcaccgaatcatcatgtggtattgaatacagccccacctgtttttcaggcaaacactcggtttaatactattgtggttctggtggtagatgatcatcctatcaaccgccgtttattggccgatcagttgaaatccattggttttcaaacagcgatggcaaatgatggattagatgcgttggaatatttgaagagcggggggattgatatcattctgacggatgtcaatatgcccaatatggatggttatgcgttaacaatgtatttacggaatgatgggtgtaagctgccgattattggtattacggcaaatgcactggcagaagaaaaacaacgctgtattgatgcaggaatggatgattgtttgtcgaaaccggtttctctggtgacgctcaggcagacactgacgcaaatgatttgaaaccccggtacaaaaaaatgcccggtacaaacaaatggttaccgggcatcaggacgactttcatattaaaataacgaacggtatttactgaacgtgattgctcgtattgattgtgacagaagcaagataattgagtaatgcaatatcgttatttacccccagttttaccatagccgattttttctggctgctgatagtcttgacactgcgtttaagttttttggcaatgtctgttaccaaaaagccttgggcaaatagacgtataacttcactctctttttgtgataacggtttatcgccatagggggttttcgtcacttttttcaacagttcagaaacgctgtctggcataaatttttccccttgattcagggccgtcaatacatcaggtaaatctgttggtgctccttgttttaagacaatgccttcaatatcaagttcgagtacagcacttaaaattgctggattattgttcatggttagaacaatgatggatagcttgggataatggcgtttgatgtatttaatcaaattgatcccatcgccgtatatgtccccaggcatggacagatctgtgatcagtacgtttgctttaatacaggacagattgttgatcaatgtggtcgagtcttcagactcagcgacgacgttgatccattcaagccgctcaagtgatttgcggatgccaaacaggacaatcggatggtcatcagcaataatgacgttaaggttattcatcttattagttaccctgctgcaatagccttttggtgaaggattcaagacggctaatgctattcttaatctctatttcgttactgtctgttatgtgttgttccagtgtttcgcaagaaagtttgaggagttctaggtctaacatagcaaagacgcctttcaggcgatgtgctgtttgcgaaagcgatatcagatcatattgttctatatcagtatacagcttattaatatctatcggtactgtctcgacaaataattgtcggtaatcgctatcagttagctgtttttgataactatttataacattgtcaaaatcgtaatcgctgctttcatcgttaaatgctgacatttctaaatttgccgtgaattcgttaaaactgaaacttctctcaattaataacgaaatggcattgataaccgcttcacccagattgtagttacatcgaatatagtcaggttttatctgctcaaagccggccagattatcaaccagtaatatagccgattttgccgaatcgtagggtttatccgtcaacatgatatcgtattctcgattcatattttctggctttttatcgaagtaaaccgcgccataatgatgcagatgattttgtacaatcttacggatcttcgtattgctgatatccaacaaggcagtaatgtcttccagtagcggcgggcattggtcttggccgattattaagggcagactgatagcatagtgcgtacccaggttgggtttgctgtttatagtaaaatgaccatttaattttctacataattggttacacagataaaaggtcagccctgaattggattgatatttatcgcctgtggctttgcttaaaaatggataattcaagtttgttaaatctgttgaattaagtccggcgcctgtatctataatgtcgatttgaatgtgttctttgtattcctgagaatagttaacgatgagagatattttgccataagatgtaagcgtgattgcataattgactaacatcaggacgatcttactgatggcagtactatcgccaataaatagtgattcaggattaatattacaatgataataataattcaatcctttgttattcattttaggaaacacttttttaataatatcctctaaaatgactgataatgaaaacgattcattttttgcttgccattcacctgattctaattcattgagtaatgaaatattctcaatccagtcggagatatattcagatttagtcaataaattatcgacgatacgaacactattttcttctataagaatttgtttcagttggtaagcgagatgatctaattcttttattggttgttttaattcagaacgaatgttggtcaacataaaacgccgagcttgtacactcttatcgtgttccaaatgggcaagttgtagacgccggctaattaatgcttcctgatctttatcttgcagtaaaaacagataagtttctggcaacaggcgaaggttgtacatgttaatttcatagactgaatcctcaattgaggtttggatgacaccatgatgttgcttggccatcatcttaattttatttaaatcgacattcggcaacagatggtcggcgatgttattgcacataattatctgattgactgagaaatcataaatcaataagccaatggggatattgggagataatatcgtgacttaacgcatccttgacttgtagttcgtggctcatcagggcatttggcgcgatatattttctacgaatgtaaataagcccacctaaggacaggataataaagactgaatcagccagtaacaaccagatgtttctgtataacaaatcgattagcaaatctttgagtgatatccgatacaacagtttgtattgcgtacctttaagtgattgagaaaattcgagccagaaaccattttgtgaaatattgactttattgatttcattagggggttgctcgtcatccgacaatagactgaagttggccgctgccatatccataggaagaaggtgacaaataggcaaatcaaaagcgataactgttgccaattgacccggtgaattgaacgtcgcccgataagtataaaaatagatattttcgccatttaacttatggattgaagaaatattttcccgttcatctaacgcggtggattgcatcagcatttctgaacgttttgattcggcagtcagtgttagataactttctttaaatctcaattctggtttaagaatagagtgagtggttatcagaaacagattgttatctttaccattcagatagtacatggagttgtattcattgcgggtgccccacaaaatctccatataattggaaaggcgttgtgccaactctacacttgcagtgctgtggtgaccaaaaataatcgtgtcgatagtttgataacgattctcaagccagtaaacatcaggccgtagcttcattggtgtgatgagttctggtggtttaaaagatgcgctattggcttgtttaaagatagaattagcgtggtaacgataatcttctatctgtaatactactttggttgcaacgctatttagcgcatattttttccccattagccaggcattgaagtagttatagctgtataaaaacagggaaacaaaaagcagaataatgaacagaccgtagtaacggtttatggttgatgaattaatagaaaattgtttgttatacattcgttgagtaaaagccttaataattgcttggctgtttagcgagctcgttaaattggtgaatcttatgattcaatgtatttaggctaattttagcaggatcagggctgaaaaggatattgtagattgaggattgagcgaatagtaaaaaaatcacagaatttttacgatagagactagacatattatcatgttaagagcataatcccgcgtcatggaaggatggccgagcggtcgaaggcagcggtcttgaaaaccgccgatgggaaaccatcctagagttcgaatctctatccttccgccaaatagtgaccctacgcattttctgtgcgtagggtttttttatttccatatgccattcagataataattaatccattttcataacgataagatggttatcgtctattgagcggtaaatgatgggaatgaaagctcgcagcccggttgacctgaaatctatcaatttccaatgagtaaaagtgtgtgtagtcgtttccgggcgcgagttgtgtctgtaatttatggtgtgtccacgatttattgacaagaatggtttttcaggacagattcttgttcaataaaaccgtggaaggtgagaaattaaacttttttaattggatttgaacagcatagttacagcggttacgaacataataatagccgcgcctttaaataaaatccgttgtgcccgttggcttgataacagatgtcgaatactgagagcgccgagaataaataccgctcctacgctgaataagacaaaaaccgtcagtggtactaacatgagcccccagttttgcaacgagatagattccatgttaatcaccaaaggtaatagtgcgagatagaaggcgatcgttttagggttacttaatgttagagtgagaccagataaccaagccgcagccaactcttttttcttaatgggttggtcttcaccaatggattgatgatcggcaaaccagaactgccacgccagataacccaaatataatgcggcaccccatctcaccacaacaaataaggtgtcaaaactgctcgcgataatggacaagccaaaaaccgcaaaggataaataagtgagatcaccaataatcaggccaaacaacacactaaatcccgctaacgcgccattactcacacttctggcaaccaatgctgccattcccgggcctggtatcgccgcagcaacagtcaatgccgctgtataggttactatttgggacacttctagcatatctttcctctcaaaataacaccttgaagtaacagaacatagaaatgtcacttgcgaatgcaagtgacaaataacggctctttatagacaataacgacatttttctaatgttgaacgtcttaagtttggcctattttcatccaaaacagttaagacatttttattagttgtcgaatgacttcccgagaaaataccatatcttgaacggccaaaccaacggattgaaagatagtcacaccctgatcgcacaaattggaatgagattgagaaacagtaccaatttctaccccaatgtctgacccgttaataatacctttctcccttgccttaataacagattgagaggcggcaagtaccgattcattggaatcagtaaatagggttgtattgctatacatatcttcgctgagttcctgaaatcccagtgccgaagcgccaatggcattgacatgacatttaaccggtagcgcttttctattgagtatcgggtcacgcgatgccgtggttgtgcaaatgatgtcactattgagtaccgcctcagcaggtgaggctttgatcgaaatgggaagattgagcgttttatcacaccttgcagcaaattctcggcatctttctgcattacggccccataaagtgatttctttaatcgggcgtacagataacatggcttgcaaatgtgcttttgcttgtaagcccgtaccaagtatcgctaaccggctagcatcctttgcggcgagaagatgggttgcataagcagaggcggcggcggtgcggatttctgtaatagcgccggcatccaccgcggcaatcccggaaacacctggctcgtcgtaaactaacacactaccgatgtgtgaaggtttatcgctattgctttgaaatctcactaccaccgactttaacccaaaccctttgtatggcccttccttaatataaatcggcatggtgcccattaagccgtcttcacctttaacgatattgcgcaaaggttgctctacttttctttccgattgcaatttaaatgctatttcacttagcttaagactaagttccatcgtcaaataacgcgcaacggtttctttatcgacataaagcatattgatgcctttcaagatcagttaaaggtcgtccagtttgaatttatcatcaatctcggttccggcaatactattgagaattgtcgacatattcttttgagaaacccctaacacaacatccagcatattctgtttgctgaaaccacgacttaggaatagatcaatagcacttcttttcaattgtccccggcaataaataacctcgatggtaaattcacgtagtgccaataatcgtggggagagatcgtcggttttttcaatcaatgccttaactgtttttttgtccacaccattatgaattgcaatatagccgtgtgcctgaatcgtgtagttacaaccattttctactccggttgtaatccacaccaccgctttttcctcttcattcagtgaactatcaataaataggtcgtgtgctcgttgataagcggctaatagtgaaggagattctgacatataaccactttggttaggtatccagccgaaatcattaatagaactttgaagtaattttttacttttttcaggtgtggtagtaatggtgtgtagcgtaagtaaagacataataacctctgtatattgaaattttaaaaagatctatatatttgcctattttaaagcaacattagcttttatgcggctgtaaatactgaccaaagcatttgaattggtcgaatatgagaaataaattttaaattgtgtaattttgctgccacttcggtcgtgagtgcggcatctacctctgaattggcgactgcttttgccgctgaactggttgagtctttaaaaatgatatctgcaattcttagattatcgggcaacaactctgggattaaagcctttggtgccggatgagttgcaatgacgatattatctgtagttaattcatcacgaatagcgataccgtaattaggcgtgtagtttaaaaatgcggatgacaagttaaacctgttatccatataaaactcactgatattgtaataagcattggctaccaccaatgcctgacagttatttaaaataatttgattacttgcttcttcgtaagtattacataaaacaacttggtaacttttggcgacattatttttaatggcaaattcaccaaaacgaatagcggattgctcgctacttgtgcctgacgggcctaaggtagcaatatttagaacatcaaatgtatctttgtagaaactaaaaaaaacacattccatgatgtctctcctggaattacactaataaaccggatttaaccaatgtgagaacttatctactctgcctctgattatttcttggtaatcttgggcaataacattggctatagaatcttctttttgtctatatgacacatcgtctatttgtgaaacgattgatatttcaaggccagtgcctgttaaaaaacagccatctgcttcatagagatccttttgttgaatttctgactcaatacaaggaatattgcggaattgacaaatatcgaaaacagattgtctggttattccattaagaatgccagcgctaagcgatggtgtaataacgcaattatcttttacaataaaaacatttgatgtacttgcttctgcgcacatgccttgttcattcaacatgatagcatcatcaaatccgttttctttggcatcttcatgagcaagtgcggaattaacataagtgccggtaattttggcagatgatggaattgccgcatttgatacacgtcgccattttgaaataagacatgtaaactctgcttttttggcataagcgcccataggtaaagcgttaatacagagggttgaatttacaccacttagcttaacgccaaatttctcacccggcattaacgactttttaagcactaatggcctgatataaatatcttgcttgaaaccatttttaataatgatgtttttagtaatatcggttaactcctgactggtatagggtaattcaatttttaatgttttagctgattgaattaaccgttcatagtgctcatgcactctaaatagattaagttggttattgtcttgatcccaataagcccggatcccctcaaatgtaccggtgccataatttaaagcttgtgtattggcaagaaaggtcgcattgctaaaattgagatattccccgtctagaaatacgatccaatctttattaactgggctaacgatattgtttgtcatttattggccctcttgttcatgatttctaaagccgaatttcgctcaatattgttggtatcatctctcagatcatggatgcgtgctgctttccaacttaccattgccgcggttccaatcagtccaccgacatctccgacatggatgtcgacattcatattgaatttagattccattttttgctttattttactcatgagtgacgcatcatttaattcgtcactcggttctaaagtgatcttgagcttatctgtaccggctgtgttgttgatttcaataaagtattcaaaacaatattcgagttcttcaaagatggcattttcaatatcaaaagcatacacattggcattgtttaatactaatacatcttttacccggccgatgggttctatttcccattgatttaagcctattgctttgcatcgaaccatatcccctgttttgtatcgaatcagaggtttgttccctttatataaatgggtaatcactaattcgcccgcaacgtgattatcgccaacattgagtttttgctgggtaaaagggcaaatgagttcgtaataattgttatatggaatagtaataagcttattggtattgttacaagccgccagaattgatgtttcttgtgaggcatacatacagttgtaaattttagcgccccaattccgagataagtttcttaatctatttggcgtaataagttcgccaagcactaaaatgatctcgatacctaattcttttgcatcacatgcattgttccggcaatattttaacaactcagcggcgaccgcaggtgtgcaaactaaagcggttattttgaggtcttgtatcagcctgagtactctgtgcatgccaacaacgggcgaacgaggccacattttgataacggtatgccctaaactgcgaaatacatcttcaaatgtatcgccagtggagtgcaattccgttggacccatcacgccaataatgtgttgtttgccttcttgattgaaaatagactcatattgcagagtcagaaaactattattgactaaagagtctatttcattgcgaggacaaggcgttgatggcccagtcgtccctgtggtttcataatatatccaagcgttacttaggctatctgaagatatcgtgtttcccgccttacttagatctgattttgtagtaaagggaagtttttcaatcaatgaggataaactttcatcatcatttgggtttattgcatctagacgatcttgatagaaagctgacccatttttcgtataatttataacttcttttaatttttcgtattgtattttttccaatgtggagatatttatctcgccagacagatatttttttagctcggtaaggtatttcatacctaattcatgaagttcatttctaaaaatggaatacatatatattacctggttatttataaagtggtaagttgccagtgagtttattgatatctttctttggtccaactatgccaattccagataacttcaattcatccgaatgctcagcagataattttccttcgtattcctcatatgttctgcatgattgcgccaaacaggagaaagggctcaatttaaaattatcgttagattttaattcactatgaatagcatccagtacatcatgacttgctttcaaaacaggcaaaggcgttttaatgacaccgggataacaaatgctatctttactaaagacatcgtgtcctacaatcccgtcgatatttctacctattgaaacactaatgacgctcagtgcattcatggctaacccaagcggcagactatcagcgataacgacgacacttttatgtaggttttcgtcaaactccatacgactttcctattaactgagtgaaatttatcaacttatttagatcaataataatatccgagactgtccatgtacttatttctttccatagcaccacgccttttatatgatcgggatgatgcatgtatatgtccaggtcttcgtaactttcaaagtaaccaattaaactaaagtcaactgattgctttctgtctaccgtactgcggccacaaaaccatccttttatttcacttatctcatttatatgatttaaagtcaccttctcggctaatatagccttttcactatcccagcttattccatccttgaaggtaaataagacttgatgtgcaattaagttatttttgcccagcataatttgcctcataattaataattttgagttataataacctatagaaacgatctgatttatacctaatattagcgcatgcctgatttagtttttttgatttgcatctaatttaaatagcacattgcatttatagcagtcaactatttccctgtggtaataatttaaggaagagtggcaatattgtgattctggcaatgataagaaagctgttatggcttgcctttggcttataaaaaacaagctcaatttgattgcgcttacgccttgaaaatatgttttgtcgccttgtgttctaccatattttgagtatttgctttttaacatgttaaccgatcctcatattgtttggagacaggttattttggatattttatcttccactgtcgccagacaaacaggctagtttacgaccagtggctattttttatataggtagcaaagataataaagcatttcgttgttatttctgatttgtcagtaaatagcccgctcatcggctgtattttgataagaaactccagcaatttagaagattagaggcagtagtcttgcgttggtgggatttcaaggtggatcgcggcggcaagggagcgaatccccgggagcatagataacgatgtgaccggggtgagtgagtgcagccaacaaagaggcaacttgaaagatgacgggtaattatttctgcttgattgtttgcaatgggttgtaatatactgcgcacgctttcgggggctagccctgaaacacgccggcttagctcagttggtagagcaactgacttgtaatcagtaggtcaccagttcgactccggtagccggcaccaaatcaaataagaagccgttatcttttcagaaggtaacggctttttcttgcttgatagtagataatactatttatatatccagttaattctgctattttccagtacaatttcccgctaaaacgagtttctgaattcattcataacatggttaaatttacggttaagctgatcgaaataaaaccacgtaactagaaatatagggtagcaaatttttagataacacgaatttattttcgctgggaaaaactaacagagaaaaatattagcgtttgggatatctgttttccagacatgaaaaagtatttgctataggtgtgtatccatccattcgtctggcgagagctgaaaataagatgggatagggtgagtaggaaatagcataggtttaaaaatctcattgttcagcagagggtatatctgacagtgttaaaacttttcacgtagatatttacctgataattggtaatttatcgttagcaacattaattctgtggatatcttaaatgttctgcctgatctgctggcgatattgcgaatagggctgttgcgatctcacatttgcacccgtttcgttgtccatcatccagtaaacagaccgatttctgtgtcttcggcacaggtgtggacaccattcttaatcggcattttatgacagatttcaaagttgattaaaaatattttttacactcaaatatccatgagataaaaaatctgtgctattttttatttaatgcatttttcatctcataataaaaagggggtgttatgttgcttgaaaaaatttgataaataataaagagcatgcatgttgctttaggtgctaagcgttttaaaggaaggtacattagaggattaaatgaagattataaatttgtataataaatacgtagatgaggaagagaaacacgttgtggtcatccgtattaataacgatatttatgtgttttcctctgaaactaagcttggtcaagaataggggttatttactacttgtatttaatagactaagtaaataggtgtatttaaatgatatagttacgtaacagagaaacacaaaaatagagaatgaaaaatttgttataatgccgaatgcatggatgcatgagaccatcatgaaaataatttttactactatttgttactaaaagttaaggtcaaaatatatgcgcaatattcaacaagttttagagtgttggggcggttgggttgatgatgccactggtgttaattggccaccgatcgctgctggatttaaaggtctgattgcgtcaactcgttcattacgtccttcctgctgtgataacgatggcttgatcattgatgcttgtatcgcaaagttgcagacggtggataagtctgaagaaattgaagttttatttatgtactacgctttaaggctttccaaacggtccatcgcgcgtttaattaaagtacctgatattgaagtacgttcccggttgcaaaagggagaaagttttgttcagggatgtctggctatgctcgatattaaattagaaatggatgatgaaatacaaaaacacaaaaagcttgcgcgtacgcaaaaagctatggtagtgtactaattagttaaagttgcgaataagccccgatagaaatgaaatatataccttatagatttcaagatgcatcgcgacggcaagggagcgaatccccgggagcatagataactatgtgaccggggtgagtgagtgcagccaacaaagaggcaacttgaaagatgacgggtatggaaatatcggggcttttttcatttgaatatttgcaggtaatggggagaatagggcttaacccacatcaaattcagtttaaaaaattcatgctatccaatgaactctgtttggtacgaatgaatctcaagtttcttctattgtactctgataaataagtgaaaatttaaatcataattgtcgaaggtcgcactgtgttgcggcctttttcgtatttgccgtcgcgaatcgcttacgcatattttttacctttttcgcgattggtatcccgattaaatcaatcataactcggtgttgggagctaagccttcagcaaagcttggtttacccaagcacagggtgagttattgctgtttgatggaggtatttttgatgagcaacggtagtgataaagcgggttggttaacacctgtcacgcttgggcctgaatacgatgatgagctggagcacatactgagtcgttggctaggcggtgtttctggtttgcctgacgataaagtgcattctcaatggacatcagcacaactgccccagttaccggcagatgatgacgggtgtgattttgttatcacggattttatttcagatgcctcgccggcttttgagaaccagactgacgaaggaaccaagttatggcgtcatgaggaaattgtgtgcttgatctccttttatggcccgaacagccagcggtacggtgcctgttttcgtgatggcgtggcggtcagtcagaacaatgatgaattggaacgtttcggtctttcagtcgacaaactcagccggctgacttctttaccggaacttatcaataaccagagggggcgtcgttatgacatgacgatcaccttgcggcgaaaagtggtgcgtgaatacggtgttaaatcactggtggaagcgcctgtcaaattcttaggagattaaattatgcagggtttacctgtttcaaacattatcaatgtcacgttgaatatggctcctcatgcggctcaatcccggaactttggggcgttactgatcatcggtgcaagtaacgtgatcaaccctcatgaacgtttacgccggtattcggatatcgatggtgtcggtgctgattttggattgagttcaccagagtatcaggccgcggcgctttattattcccagtcaccccgtccggttgatttatatattggtcggtgggctaaggacaatgtggtctcctctttacaaggggcggtattgactaaacagcagcaaatgatgagcaaatttattgctgtcactgatggctcttttaaattgacgattaacggtaaagaaacggtatacagcggcgtcgatttgagtaaagaagccaatcttaatggtgtggcccaacggatagcagataagttaaaagattgttcagtcgcatatgatagttcttcctcgcgtttcgctattatgccgaattctgtcgatgcggttggctatgtttcaccggcaacgacgggaacttatattggtgatttattaaagctggacgaaatatcgggtgctaccgctatcgaatctaccaaagcagaaaccattgctgaggcggtggcggcactgggatcggtatccagtggctggtatgggttggttatcgctgatgactctctgacggataaagatattctctctgttgctgattacattgaatccgcatctgttccccgcatctatggacatacagcgcaaaaagcagatgtcttggatgctgatgttaaaactgatatcggctcaaaattaaaagagagaaactatcaacgcacactttggcaatattcaaccggtaaatcctacacggttgcttctctgctgggccgtatgtttaccgtcaatttcaacggcaataacaccaccatcaccttgaaatttaaacaggaacccgcggtaaccgcagaaaacctcaccgcaacgcaagccaatgtgttgaaaaggatgaatggcaacgtttttgttaaatacagcaatgatacggccattattcaggagggtgtcatggtgaatggggactttattgatgagcgccacggtctggattggttgcagaactacgttcagaacaatctttataacctgctttacaccagtaccagcaagatcccacagactgatgaaggtgtcacacgattaatcaccaatgttgaacagtcactggcgcaagcggcgacaaatggattaatcgctcatggtgtatggggtggcgatccgattggtgcgttggatacgggggcaacattaactaaaggttactacgtttacgcaccgccaattgcgacacaggcacaggctgatagagaagcacgaaaagcaccggttattcagtgtgcaatcaaattagccggtgctgtccactacgctgatgtcattattaatgtaaacagataagggttgaaaatggctacatattcttttcttgatgtttccgcttctattaccggagttggcggctcttttgatcttggtaacggtgccgcgctctctgatgagggaattaccgtcaccatgtcggagagtaaaaacaccatgaccaccggtgcagacggagaagtcatgcattcattgcatgcaaccaagtctggaactatcaccgttaatttacttaagacgagcccggtaaacgctaaattgaacgcgatgctcagcacacaatcgctttcatcggcggcatggggtaataacgtgattgttattcgcaataaacaaagtaatgacattgctgttgctcgctctgtcgcctttcagaaacaaccggatttgcagaataacaaagcaggcggtaccgtttcttgggtatttgattgcggaaaaatcgacatcatgttaggcacattctaaccagcttacttcacaaccatttaaatcacctttaaatttgccgcagcatttgcctctatttttacgtcggacttatgctgcggtagtttgagcgagcttgaggataagtgatcatggaatttgaaattgatggcaaaaaatatcgcagtggtaaattgaacgcttttcagcaacaagatttagcggtggctttggctccggctattccggcacttggaccgctgatgaaaaagattgtgacaactaaaagtgatgatggagtgacgggctttgaagaagtgctcccttatttggtggaatccatcaatgcattaggaaaatccaaccgacatgaaattaatgatatttgcttatcagtggtttctcgtgaacagaatggtatctggaaccggatttatgaacctgatggacaggtattgatgttcgatgacatcaacggcttcgaactgttgaaaattgtcggatttattattcgagacgcattgggaaatttttttcccgccccattagagagtgcagtgtaatctcaggacaagccaatttaaattttgaaaccctcccgaaagggcgtgattatctgttacgcccggtcattgcgggcatgtgccgttatgaatcattgaaaaacagcgttcttgatctggctgatattgcattgatgaatgatgcccttgatgttaaatcggaaaatgaggccatgatagagaggtggcgaaatgagcaatgacgttgaaacaactaaagatttcctgatatcgctgaggtttgatgttgatgaagtggaacagcgtaaatttatggctgttatcaccgaagtcacgtctggcattctcaaaatgagggcggaaattgaaaacgcaacatcagttgtggccagttttatcacccaaatagctgacggattggataagttatacgggaagttgcaagaaacagacgcagtggttgaaaaagttaaatctatcaatgaggaaagcgtccgtcgagcggtgggaggtgtagagagatttctgccgagcattaatgctcaatcccatgatacaaatggtcgccattttaatactgcctccttggtcgcatcaatgaatgagcagttattaaaagcaacaacggattgtgctaatcaaaataccagcatacttgatagtgatgacatatttaatgccattgaggaattagttaaatggttagataaaggagaaatttctgcgaaaggtttattggcgacattgaatgaattatggaaatttacaggaagaaaaattgttctgggtgtattatttgattttaatagtcggttaaatgcattacaggaagaagcaaagaaaaatcacgaaacagtggctgaaacgttgtcacggcggaaaagagagtatgataaaaataaaaaaccacttataacatatgatcaactcgataattggatgtcaacacatgggatttatcttgcttctgacttgactccatttttcagtaaagataaatatgaaaaataccaagaacaaattgatggtaagaaaacgataatccacaaacaatatagccaaaaagttgctgatatttccagtaaagtatcagaacgatcaagtaaaacgaaaaagaagcgcaagactaagcgattaaataaagatcatcttaagactggtattgttgaacatcacgatgcgcctaaggaattaaatactccagttaatcaaccaacgaatatttttaatagtgagcttacagcagcaaagctaaaaaaattaaaatcttcgcgaggagtgcggaataacaatccattaaatatgaactttgtacatcagaccggggcggtgcttgaagataacccaaagcccagatttgctcagtatccagatgcttatagtggattaagagctactgctcatcagttgacgcgttattttcgtggtaaaactacaggaaaaaagctacagactattgcaagtattgtcccgacatgggcaccaaagaaagatcataataaaaccaaacagtatattgccaacgtgtctaaaatgatgggagtttctaaggatacgttccttgatctcactgatcctgatgtgatgcaacggctgattgatagcatgatgatagaggaaagtggtggtaatccctattcaccagaatttatcaggaaggcgattatggcagagctacagccagcgaataaagcgccaaagcaggctggacatttaaatcatgtagctcactctttgcagaatatttccattgatcaccgaatgatcaacggcgcggtaaccaatatcaacggtatgatgaatcatcagggattgactccctttttattacatcgtgcgccaatatctgccggcaataatataccgggaataggagaggtcaattatcatattgaagtcaacggtgttgaatcccccagagaagcagcaagactgactggagaaacggtagaacgtactcacagtatgctgcttcgaaatatgcaaacacaggtgaaataacaatggatatattatcagtcatgttttctcagcaaaagagaaaaataggtgttattgtaccgagtgtcgttatttcagaaacccataccgatgtatcgaatatcaccgatcatccggtccagcagggggtgacattcagtgatcatgcttatgacagcccatcggaagtaagaatggatttaggttttgccggtggaggttcgctgcttgatgttattgatacgacaaaagtatttgatatttctaccgggctgagccttggaaccagtccgcgtgatatatatcaacagttacttgacctgagggcatcacataaaccgtttgatgtcgtaacgggaaagcgcttatataaaaatatgttgattaaagatatcagtgtcacaacagatagaaccagtgaaaatgttttatcggtggctttaaacctgcgtgaaattgttattgttgaaacatcaccgaataaggccgcgccggcggaaaatatgaaaaatcctgaagatacagcacctgtagttaatatgggagctaaagtcacggtgaagccatcaatgccaaaaattattcttgattttattatagagcgaggtaagaaatggctagggttgtagaaattcctttatcacctcaaaatcagcaattcgatattcagctcaatggcattaactataaaatgagattaatgtggcgtgatatcgcgggttggattttggatattatgacgccggacagtgaatttatcgttacaggtttgccgttggtttttgggattgacttactggaacaatatcgtcatcttggttttaacggctcattaattttttatggtgatataaatcaggagaaacctttcaggaataatcttggtaaagaggacaggttatactttgtaataagttaacttgatgggggtaagggaaagatatttttaataatttattacatacgccgcttaattgcggttcttttatttctattaattaggtgaattatgtcaaaacaatggataagagaatgccaccttatcgttgtagacaaagatggcgaaaaagtaaatttatcagacctgaaaatcacatttaacattagcagaacggaatcttccaatcctgctagcggtatttttactctatataacctgaataacgaaaccagtaataaattacgtaaaaatgaatttaaaaagattaaatttgtggcgggttacaaggagaactcaggacaaatattctcaggccaaattcagtacacgtatgtaaaaagagacaacgcaacggatacttgtgttgtgattcatgcagcggacggggatgaagcacacaattacgcgaccgttaataccaccattgcggctggatattcgcaagcagatttagatcatttgctaatgcgtgatattgccaaatatggcattaccgccggtctacgccctgaattcagtaaatcagcatcacccaggggaaaagtactttttggcatgcaccgcaatgaagtttctaatttggcaaaacaatgtgatgctaattggcgctatgaagataacaaactacacattgtacccaaaaataaatacttaactgaagccattgtccttacatcaaaaacaggccttattggtatgcctgaacaaactattggctccggtattaacgttacatgcttaattaatccgaatatccgccccgggacattaatccgactggataaccgctcaatcaaaccagttgatccggcgactaaacaagctgctcagtctggcgatcataaggatgcaaaagcacaaccggcaacgttggacgctgatggtgattacattgtcttcaatgtggagtactccggcgatacccgcgaaacggagtggtacatggcaataatgtgtatcgccaagagcgatcatactttgctgaatcaatcaactcacaataaggataaggcagagagcgaatgataaatactgacgaacgactcaatagacccgaagcggtcttttttgctatgcaagaagtcattagcgccggattgtatgtctccttgccttgcattattcaatcatttaatgctgatgcggtaaccatcaccgcgcaaccggccatcagatggaaaatcaggcaaagagacggggaactggaatcggtatccttgccactattagtggatgtgccggttatattcccaaggggaggtggcgtgacattaaccttcccggtaagagccggtgatgaatgcttagtcgtatttgctgatcgttgcatcgattattggtggcaatctggcggtgtacaagagccggtggaccccaggcagcataacctgtctgatggatttgcgcttattggcccgcaatctcagcaacaaaaaatagcgaatatcagcactcacaccgcgcaactgagaagtgatgatggcgcggcgtatattgaacttgatcccagcagccataacgtcacgattatcacaccggcaaaacttatcgcgacagccaatggcggtactgaaatcacgtcacctgacatcatcctgaatggcaacgtcaccattaacggcaacttatcacagggcatgggcgctggtggtggcaccgcaaccctgcaaggcccggtcacggtgagtcatgatgtgacagcggcagggattagccttaaaaaccatgtacatagtggtgtgcaatcaggtggcggtaagacggggaaacctcaatgagatacagaagagaaattgacaacgactatgtatttggtcgtggagaggcgggttttcttatcaactcaccggaagccgtcgcacaagcggtgaaaacgcgcctgatgttgcgcagtggcgaatggtttcttgataaccgagagggaacagattacgacgacgtgttgggtaaaggcacatcgagtttttatgacctgattattagacagcgaatactgcaaacgccgggtgtagagaacattacccaataccgtagtgaaagaaacccagaaacaagaaaaatcaccattacagccacgatagacacgatttatggacagacaggagtaactgctgatgtatgaaagtattatcaacaccatgttacctgctattgataaaaacgggatcaatgctcctgattatcaaaccatcttgaatagctggaagacgatattcagggatatttatggggacgatatttacattgaatctgacagtaaagacggtgtttttttatcgctgatagcatacgttattcacggttgtaacaacgcaaccattgcttcctataactcatttagcccgacaacggcggtgggcgaagggctttcccgtaatgtcaaaatcaacggcatcaccagaaaaagctccagtaactcaacggtggatgttttggtcactggtcgagcgggcacagttatccgcaacgcttccgtccgggatgatgcgggaaacgcttggtcactaccggatgaagtgattatagatacacacgggcaggctattgtgaccgcgatttgtcaaaaagcgggcgcgatcggcgcattgccccacacggttaatcaaattgctacgccaacattgggctggcaaaccgtgacgaacccggttgcggctacacttggtcggggaattgaaaccgatgtagaactgcgaatacggcaagaggtttccgttgcgctgccttcgagaaccattatagatggactgatgggggccattgccaacctgcatggagtttcacgttaccggggatatgacaacgactcggacaaaacggatgagaatggcatacctgcccacagcatatcgcttgtcattgatggtggagactcgaaagagattgcccggactatcctggtgaagaaaacgccgggcataccgacatttggcaccacctctgaaacgattaccgatgattatggcaataaaaaaacgataaacttctatcgccctacactggtgccaatttacgttgaaatacacataaaaccctttatcggatatacatcagatattggcaataatattcgtaatgaaatatctaactatataaaatccctttatattggagatggagtatatgtgactcgtttatttgtaccggcaaacttatgcaataaaaacggtggacagacatatgaagtattatctgtgatagtgggaaaatcagcatcgacaaccggaacggcgaacattgacatagcatttaatgaagcgccgacgtgctcacctgaaaatattaaaatagtaacggtgcttgaatgaacagatatatgaaactaattcctgcatatcacatggaaggtaaaaaatatgtcaggatgcttgaagctgtgactgatattttcaaccagaatgcgctgacaacagatttactgattagccgttttgaccttgataaagcggtgggcaaacagcttgacattattggagaatgggtaggaagaaatcgaatgatccaaactccaattgaatcctattacttctcctttgatattactgacttaggatttgatagtggtcaatggaaagggcggtttgacagtgataaaagttatatcaaactggatgatgataattatcgggttgtcattaaagctaaaataggcgcaaataactgggatggaacggctgagtcatttaataacatcctgagttttattcattcaaataatggcctatcggtatcttttgaagataacttggatatgtcattcacagtaacgattaaaggaaaatcaatcagtacaattactaaagaaatcatccatcagggttatctctcgcttaaacctatggggataacggttaattaccatatagtggagggttagaaatggctaaaaatgattttaaagcatttgccattggtgaaaacgcgaatactttgtcacaagaagaatatgaaagttcagattttattggggagggttttaaatcgggaatagcgaggagtgagcgattaaataaagtttggcgccaatcttcggttattgctgcggtgatagggaaatatattgcagaaaaaaccggtgaagacgttatggatgatggtgatctggagaaactcgtagcgcaattggatttagcattaaaacataaaattactacagaaatccctgctgcttcactgacacaaaaggggatatcgcaactcaacagtgcgacaaattctgacagagaagaccaagctgcgacgccgaaagcggttcacgatgttagaaaaatcgctgagagcaaattgagtggtgtttctgatgcctcattgactcagaaagggattgtacaactgagtagtgcgacaaatagcacaaatgaaaccttagctgcgacgccaaaggcggttaagggggcatacgattttgcaaatacagcaaatgtagcggctaaaaatgctcatgatgaagcgaacagggctacagataatgctaacagcagattggcgaaaaaccaaaatggcgcagatatccctaataaaagtgagtttataaaaaaccttggtttaacagaaaccgtggaattggcgaaaagtgctgtgccgaacagccggaaaattaatggcaaggcgttgagtggggatgtcagtttgaatgccggagatgtgggggctttaccgattcgagtacattaagcgctcaaacaggctccttaagaataaacaatggatcgaattggccgaatatcgaattcagagcagcaaacaagcattttatcggtattgaaggaacagctggcaatcgtttgacgatatacgctaatgatgaaaacagcaatcgcaaatatactttagcaacaccagaaaaatccggcacgttagcaacacttgatgatatcaacatatctgtcggctcacccatcccatggccgttaccaaatgtgcctgctggttatctcgcatgcaacggtcaatcatttaataaatcactatatccacaattagctatagcttatccatcaggtgtgctgcctgatttgcgcggtgaatttattcgtggctgggatgatgggcgcggtgtggatcgtggtcgtggggttttaactcatcagggggatgcaattcgtaatattactggttataccccaggtacaattttacgtggaaataatagttatggaggatgtttttctctttcaggtgaaaaggctccaggaaatgaatatacagatgtctggcaaaaacaagttctctttgatgcttcacgagttgtccctgttgcttcagagaacagacctcgcaacattgcatttaactacatagtgagagcagcataatgaatacacaaaaatactctttagaatatgagattgccacattaggtaaagatggattagcagaaaaagcgggctggctgacaatctaccatgcagcgcctaattcaagggaatttatcggcacgacaccagaatatctaatgaagggagtaggcataccggcgagctcctatacagataccccgacacttcctgaatccgattttatggctgtcaggcgcacggcagacggaaatcactgggaaattgtacccgattaccgtggaaaaacagcttacaacacacaaactcgcttaccgcaagaaattactgatctgggtgaactacccaaaaccctgacattcgaacaacctgctactcattttgataaatgggatggctcaaagtgggtggctgacaaagcggcaataaagaacagtgagattgagcaggcagaacaactacgcggcacactgtgtacacaagctaatgaaaccattacgttactccaatatgccgttgatacggaattggcttcggaagaggaacaggcattgttacttgaatggaaaaagtatctggtattgctgaaccgtgttgacacttcattggtccctgatattaaatggcctgagatgccagaatgacaacaataagggctgcttatgcagcccgataacaaaaatacatatcagtatggttttttaggccagttaatgtccggtgctaatgtgacatcaatacgacttagtgatatttggtattttttccaagctactaattgtgctttttcctcatcatttgccatatttagatcaatagcatcttgtaatggtgcgatttggtttgttgcttcagctattaattgctgtttttgaaatttagcctgttgctgtaattcttcttttgtggggggaggaatatctgcccattctggtaaaccatttttacccgctattcggtatttaccctctggtggaatactgccagcaaactcaatgaaaatagcctcattaacttccactgcatcatttggaaatgaacctgcattgatatagtcttgtttccattcggctggataaaatgcgttagttgttgcactgtaataatacataattaataccccactgctaaccaataataacctacactaataccagtattagcatagtcattagtcaatttgaatgaagatggacttagaacagcggcgtaaccattagctataccaccactggctcctagtcgattcactgttaacattacattcacacatgcattagagaacctaactggtagctgaactgtgataatctctagaggctctagaactcgagttactccccactgataaatcactccagtatcgccacatttccaccaaccatttgtagactttaaggccatatttttgctgccatatcgcccatcacattcacctgtggtatatgcgcctagctcgcccggtgacggtttgtttacagcactataaacacgaatacttgggtattcatacacacctctgccggaaatagaccctgttgcatccaagtacccacccaaaacaccaccggattttgggtaagcacttttcgccaactccacggtttctgttaaaccaaggctttctgtagttcattaactgacggcaatctttgtcaacgcagcttttaaaggcattcaatgggactcaatatggtaaaaattgggcagatctgagtaccaataaataaccaaaataatgattgagaaagaaatgtattaactatgatggaattacgaacaataattgggtggaaaatatacagaaaattagcctcactttgcgttttaacgcaagttcatttgagataaataaatttactttgtgtgtatgcgtgcatatgcttatgtcagattgggaggatatgaaatcaaccaacctgataaaagagctgattgctgttggacgcgaacttagaaggagttaccaataaccggaaagacatactcggttccgcatcccaaaaaatatcagcctatcagtattgccaaatctataaagaaaatggtgagagtttaatccccgtcgactttggaggtcatcatgtttttttcagtaggtgttgagttatcgaaaaatgaaaatacagcgtatggtttggtcattcctgcgctgtgtgccgaagattatggctgtttttctgccgcggataataaagaagacattgcgataatggcacgtgaggctatcttgttaacagtaaaagatatggtcgcgaataatagcgcagttgaacatattcaggatgctggctatctggtttatgcaaaaaacgcagaatatcaatacattgataactggtttgttatcaacgttgatttatctgagttttccggaaaacaacagcgtattaatatctcattacccgatacactcattcagcgtattgataatcgcgtcaaagaaagtccgacacaatatcgagatagaagtcactttttagctgaagcagcaaaacatgaacttaggtaacactatggtgcatggatgcgccatagtttaaaaagcattcaattgatgctatgtttgtgagtcctttacactgccgtatgaacgcaaaacccgaatgataggtgccgcaccttctttgctggtcataaagcaaccaaaataacgatttatttagagaaaaatacattcattttgaaaaaactatgaacaagctttagatgataaattaacgagtttacatagttttctttaactcgtattatgcgatgtattacacttttagttttagaattatctatcatgatcatgcaactaaggaagccgatagtttactgaaatttactaaagtaaagtatcaggaggaaaactcgtaaatattgcgggaaccaaatataaaaccctttaatttgcatgaagcccccgcaaaccattagatcactcattaatacacataaatcaaatagatattaattaaaatcctttaataaaatacattaaaaagcatcctgtaattacaccaaaagtaaaatactttattttccttctattttcgcgtttcctctgtcttatctcttcatctgtttttatatgatcatcccaaccgatatgcctaactgcgcttttatctaaaataactgcatatttatctatttctgcatacttctttgatagtgtcatctctgtatcacctgctagattatagggcatgaataattcataatctgattttcttctaagccctggattaaaactgaatcccctccatctgaaatcattgctttccagagtagaaaaacaaacaccttctaattctctaaaattactagggtaatggaatggataatgaagcatcacatcctcttttaaatctctgagccagacttggagtatgtttttatcagacttcaaagcaacaaaagaatcctcaataaatctatctctatagaaaagccaatcgtcttcacaatggaagatatagtcagtttttactttactatatgccagatcaattgacttaatttgccctagtttaggattgtttaaaataatttcacagtatggtagccagtgctcaggtatgacagaatgaatagacttatctccagaatcctccgttacaacaacctcttttataggataagaattatacttatcaaacgactcaatagtttgctttaataaatcaaaccggccacaacttgtaatgaccagggtaacatcacttgaatcagaaaataacataatatttactcattgacttttataaaattcactattacttggtatgataacaaacaaaatactactttcatagtgtcagaacgataacttaattttaagtattttttagtaaaagatcatatattaaacctgaacttatcaatatcctcaatataatatttatggctttatccgtttcaccaataagcggataaatatccgccaaaacattgtatataattttacgtataatgaccttctttttctttgaattctgaagaattcttgcctactttgcttttgtttttttctttctagcgccaagtttgattgaagatatagcggcgttgtagagatgaccggaggtaccactgctttcacttttatgatccgtctttcattgagaaaacgccacttatcagcttcaagccaaacgggctgtagaaaatcaagtaaacattgtgcagcgtaattattaattacataaccataagtacaagctgcttcaatcacattaactaaataatactgacccgttatatttttcttgaaagtgtcaatatattcgttagttttattaagtaaaatgatattgggtttgttaggatttttggtgttgaatttatctaatgcactcagtacatcagagatatttttattgatttctgcatcgtcttccatgataagagctaaaggaatgttttcgtcgacaattctctggtagactaatagatggcttaacgagcatcctagctctccaagagtcatcccgttattataaaagtcgcgactaagtttcattacttcatctttggaaagctgtttgccatttaccgctttgattatttcaacatccaatctcaaagatgatgcttgctgtaacatcgaatactttctttcgacatctgattctaagttaattataaaaattttcatttttttcctggtaaaaagtagggaggctctaaataaaaaacaagctatgaaatttctaacatttccaaatatttcaacgacaccattaaccctcaaagttgaaaccaatcatcagtgttttctatgtttttcattttcttaataattctcttatcacttaactatgctgtggtcatagcaccaagatctcctcaaatgaaaaggtaaaacattatccattcgttgaaatcatattttttcttattttcataaattttcttttaaaactaaatcgaatattactatctagcatgaatcctaatatcgaaaggtttttcactatctgatagatggagtcagaatatttttttgataatttatcctcatatttatagatgagttctatagcatggcaggctgtgagattcctaaaatttttaccgaaagttttatccattattaagatcacttctgccattatatttacttttacgtcattaatagaattagaaagactaccttctctctttatataattatagtatttcatattagtataataaatactattacacttaactaaaaaagaaggaaatgataacgcatcttcataacaaggaacttcaggaaaattacttccacaaaataactccttcctaaaaaacttccctattgaatgcgcctgaaatttcttatgaattaaaaattcttttattgccgtgtttctgtgaagttttatgggagatgataacctcgacctttctattatatccgcatcttttcttacttcatttaacttactgataaatatatccggctgtctatattctaagaagtctaaaatttctctcatagaaaaatcagataaaaaatcatcaccatcaacgaaagttatatactctccactacttatctctactgcatatttttttactttacctaagttcctaaactcctttcttatataaataaaagactcattttcttcagagaatttttttaaaattgatggggttgaatcaaaagaactgtcatctatcagcaaaacctcataatcatcagaagagactttatataggcatttttttacgctctctaagcattttcctattaaatcctctaagttatgtgctgcaactataattgataactttttgttagaatgtaaatatgaaccttgcattatcatacctcttgtattatttagtagatgccattaaacgtcaagtgct

SEQ ID NO: 31 - DNA, 102644 bp, Photorhabdus luminescens
aaggtgttaaatatttcttatcgtacggttgaaactcatatttcacgaatatatggaagaattggggttcattctagtgatcaattggaagagtattgtcgcactcatgattatcatctctatatgccaaagaaatttatccatccaaaaaacagagtttttctttaacctttagaataaaggagttttactaatatgaaaaataactattcactatcacctcaagttattaatacaatggaaataagtaatgaaccgtggggagtcaaggatagttcttcaaactttatctacggtaattcagccacaaaaaaatttatccataattttaaagcgtcatttgattatgaagggctttatgatcatgaattgccctgggatggtgctgaattcgccaaggagtttattctccacgataaaagtgtcatgactaaaggcgaaagagtctgttcacttgaaacccatgtttttgggcaagagcaaactttgtcatcctatttttgtgaaaaattgcctctttatcatgataatggtcattgtatgggaattatgtaccatatgtggaaggctaaagagtattcattgacctgcctacatcaatattatgataaattaccgccatccttgctattccagcccccctccgatctttttactcaacaggagtgggatattatctttctcttcttacagaaacagcccaaaaaacagattgggaaaatattgaatatcgcctatcatgaggttgaagaacatatgctaagaatatatcgcaaaatcgggattcactccagtcaacagttggaagagtattttcgagccaataattttgagcactatatcccagaaaggtttttattgtcttagattacgtattattccccagtttctacatgctacctttgttagttatttattgataaaatatacggccctatggaaatatgctttgctttcaatgatgtatttacattcaataagttaaaaaagcaataattatcttaaaggatatttatgaataaatcaggattaaaacaagtcccttttattacccgccagttaacacatgtatgggacagaagccctgatccttggtttgtaaaagataaggaatcccgctttatttatgcaaataccaagtttattaaaatcattcagttaccggaaaactttagtattatagggtataccgttgaagaattaccaatagctgttaatggttttgcccatcactttaaagaacatgatcgcaaggtgttagaatgtatgcagaaagtatgctctgtcggcacttatcctcaaggtaatggtcggccgcctaaatcctatttttgcgaaaaatatccattgatgagtgaggataatcactgtgtcggcattatctctcacgccagagaattagagcactttacggtttatcattatattaaagagcatataccaacgtcagctagcctcaggccacctaatgatttgttaaatgagaaagagtggatggttatttttctattttgctgcggtatgaataataatgaaacatccattgaaatgaatgtttcatgccatgcggtggaaaaatattttgaaagtatttatgaaaaattatcggtcagctcattgactgagttacgattactttgcaaagaaaaagggtatgatctctatgttccatcaaggtattttctatcaataggccattttatattataaataatcgattttactgttaattattaataattctattaattatttagataataattagggatacaattaatgacatcgccaacctttacgttaattcaggatttatagcctatggatttaaagatgcatcgcgacggcaagggaatgaatctactctcgccgaaataaggcgggaggggcgtttcgacgggactaacgtcccgtatagtgtttcacaacgtcgagcatcgtcacacgcgccggcaaaatgaaaacgagacccaagaacggacttgttgtctgcctctcatactgatggaaagcggtatatcgggagtggttgagggtgtagcaaggaagcagcctgtgcacagctttgactcagcagccttatcactgtctccgcaccacttcgattaggatttatccttatcatccgcctctctaacgtgggatcagattggcgaaatgtaccagataatcggtaaaacagtggcggaatgtcaaactttgattcagcgcccaccggatatggcagtgcaccaagctgatgagcaacatgaagtacctgttcggcaatctcatcataaaactccaccagcaatactttcgattgtgcattggcgataaacgcctgtttcacctgcggtatgatcccctgattaagccggaccactaatgtttcactcacctgagcctgcacagcatgcatcaccggagcaaataccaatccacgcaatacttccaatgcctgaaatccctgtacttgactgccaccggaatacatactacgccgaatgcgctctattgccgcttgttgacctaccacaacaccgataccttgcgggccaaacagtttaaagctggagaaggccgataacgccgcgccccattcacaaccgatacgttccactttcatggcagcatagttatcgtcaaccagaaccggtagtgatgccgcattcagcagtgatataacgtctgccagctcataagcatcatcaattttctgccgcgtgtgttgtaccaaccccgccaccggtaaatgttgcaaaatcgcagctcgtatttgttcggattgattgaaatcggcccgcaccagatgcaagcccatctgctcggcaataatcgccgtcgagggatataacggcgcatcatgaaccagcaagcgatcacccgcattaagtaatgccgatagcccacaacgtattgccccggttcccgccccttgtactaacacagcagcctcagcagaaaagaaatcggcaatgacctgttcaacacgttgcgttatctgtggccggttcaatcccggcaccagccctaaatctccggtggtgaggaaatcagcaccgggaaaatggcggcaaataatgtcaactaaatgaaactgtttgtgctgcgcctgctccatgctcagactaggtaatggatatgtgttcactatctgttctcctgttctccctcacttccccccctctatttttatcatcacaaaataaagggggagaacagataaataacgttagctagcaccccaactacaatcgttgcaatcggcccaatcgccatttcaaccaaaggacgtttagccgtacggttgagtagataaatccccgccaccaccataaatcccatgcccggcagaatggcgttggcagccatcattccccccaccaataaggcaacttctaacatgcgggtaataacagtacgaatatgctcaccacaagctttgacgccgggatatttatccaaccagatagcaattctcgccagcagtttgatttccataaacataatcaaactaccggcaatgaaggcaatccacagattattcgtgactaatccggcgacaaatacaaacttcatgccgaccgggctataaaccccggtagcaatggctgtcataccgactaacggcacaaagctgatcgctctggcaagcgccaccagcatggcattagccccttccccctgcgccatcagttgcaaggataccggaccttccgccagcagactgagtgacattgaagccgctaccgccgtcaaaccaccacttaataccagcaaccaaatgttattttgaatgcgctgtatccgcgtggagaataacccaaccagcgtctcattcgcccctttggccggagcagatccctcgccagctttgggaacacgctgtttcatcgcgaagtagaacatcacaatcattgagatcagcagggctatcccgttaggatccaattgcaccggtttgctcagagccccaccaaaacttaatgatcctaccgctttggtcgcgatataccccaccaatgtcgcaatcagtacccatattcctttgccatatccgtattgataggccacaacaatcgcaggaaatagtgcaaagcaggctacgataggatcgccaactttactcaggttgcccatgaaattaaccggtaaatgggcaaagatatcgacaaccgatcgtaaaccggtcatcaaggcaacggcatacagcgctcccaagacagcagaaagtatgaaaccttttttactgtttgcacaccaagtaccaatgacatcggttcccaataataagctatgcaccagaataatcggggcggtcagcgagaacggaataccaaagccgataactaacccaaaacttagggcaaaactggtggcagccagggttttacgattcatacgcccttccagatgttccggcattaaaggacgtagcccatcatgaaatactgcaataccgcggttagccatcatggcagatatcccaccaatcaccgccaataaacccgctttaaatggatcaatttccattaaacgggtgaaaaattcatattccattttcctctccttatgaaaaaagaatagccttgataattaccagaataaccgcgtctatatcctgaccggtaaaaccaaatgcggttttcccggcgtttacatgggcaataatttcttcatcaggcaggatcttgcctggcatactgacggtggcgcatttgtcaataccaacaatagcaattgccattgccaaagcgcctccaccggtattacaggcaccaaaatagtaatccgcatcaccactcttaagcgccatagcggcatctatgtcacccatcacggtaatggatgaggctttatcgccagccagatggcgtaaagtttcagcaattttttctttctcaatttgtcctccaataacaaatctcataggtttttcctttagttgaaaaatagcattgggttatcacgtaacatcaaatcaatatcggtttgcgttaatccagcccggtttagcatcggcacaaaggtggtgattaaataatcaaatccattgccgccattggcttttaaatgagaacgacgggtaatatccatcgataacatgacgcggttaagcaagccacgttgggccaaggtctgtaacatagcgatccgcttttcatccgggtagtaatcgtttttgccaatcgtgtcgaactggatataggcccccagttcaatgatgcgcaaaatgttgtccagattatctttaagatcacagtgaccaataactacacgttcagcatctacaccgtgctttttcagtaacgccagttgttcaaggcccatcgtgcttaatgtcgtatgcgtcgaaataggatgcccggttgccagatgagctatagccgcagcatgaaagactttctcttcatccggcgtaattacccctttactggaaccaatttccccgatcactccggctttcagcgttgtatcgtcgataccctgctcaatctcagcgatcatttcatccgccagttgtcgagctgtggtatgtgctacatgttcaggaaaaaaggcagattggtaatagccagttgaaactattacattaatgccggagtcccgcatcagatccagcataaactgtgggttacgtcccatgtaacgattggtcatctccacaatattgtgtacacccaagctgaccagtgttttcatctcttcacaaatcagctcgtattgatccagtcggcagtcaatgttgtttttaaatgatgataaatcgagatgcaggtgctcatgtacataggtatagccggacgcgtcaattctgtttttctgggtcatgagtaaggcggtccgcagacgaagagagtggaactgtgtctgttcacagaccatgttctccattaatcgggatagggtttccctggctgtcataaagcccttccaagaccggatgccctgactggataccgctaactaacgccacatcactgcgggtagcaaatatctgggtgcgaaaacacagcacgacagcacagccgaccggaaattcaccgctcagaggaaagtggtaatcaatactggtgttatccatcggtaacaggtgcgtggcggcgatctggccgtttggcaggaatatcagcgcgttatgcgcccgtccacgacggtaataaccgcccccatagcagtaactgttaccgttaaatcggtgggatatttccgtcaaatagagcatagcaatgcgttctggctgctctccccgaaaattggcaaggatggttcctgttagcgcatgcccgggctcggtatgggtcacgccatactttgccagtaacggcagtgtgctacagcttgacgccgatggcgcatttatctgcgtcacctcaaccccagtttgtcgtaaaatgtcttttgctttcagtaaagtaaataagtttggtgccggcagtgtctgctgctgatcctcttgccacagcaagcaaggaaaatgtgtcaaccccgtcagttttacaccgggcattgccataatgtgctgaacgatggtgtgcaattccgacaagtgaaaacccgcttcctgacccggatataaatggtcatgatcatcgtagattttcagcataatgcgttgcacatttccctcacgccgcgccagactggaaatttcctccgctttttctaaagaatatactgtgatcacttccggatgttgctgcatcactgaggagaccatattacgagggatctgtaccagatggcctgcatgagtcactgggatcttcccactcatcaaggctctagcctctttaaaatccaccgcggtgacaccctgataacccaattccatcagtttacgtgccaaccaggagttacgcccaacctgtttggtcatcagatagagagcaatgccataatgctccgctaccgcaagcaatcgtctggcattttctaaaacctgatccacgtcaatcacataagtatcaggcagtaagaccccttgcgcccataatgtctgggctgcctcaatcagtgccggattttgtttgttcagtgcatgtataaacatgcagtacctcctgtactccttcggcgatcaatgccactgcattaagttagatgttaaatcatcatttttttgaatatttgatggaaaaaaattccctcatctctatggtggtattatcactgcccctttgccgcccaaaggctaaacaagtttgccagcagataaccctcttcacagggatgtaattgcacgtcaaaatgtgccagcagcgaagcgttaattgcttgcaaatgagaaaagattctcgattgacgcacttccatcagcagttcattatccattgaactgatttgttctccccggcgtgagcgcattaacgcgttggccatatgtgttattactatttcccctaacgcattcctgacaggaatttcccaatcgttttcaagctgcgccacaacttgtaacatgccatcatgaatatcctgatcaatgacatttccctgatagagcagattcagccgattttccacgcgttaacgccatccatgccaaattaataacttgggtcctgttgacctgccagtacacgttgttgatgaactaataactctgttgtatttaccatcgtgcgtaaaagttgttgcatcagaatgtcatcagctctggttaaaatcaccgcttcagaggctcgggtaaaacatgcacttccactgagcggtactgcaataagctctctggaactgagttcaacttctctgctgacgttccagatcacggcatcaatgtcacctttcgcgaccttatacaggctctcgtggtaagaaatatccaccaacgtgatatcctgcccggcaaagtacacttcagtcatgattttctggtcggcagaacgatgatccaacccaacacgacggatattatgttcacctcctttgcgataaatcagttggtgtgcaccaacataggtatgtggccccaattcaagtacagtacaaacatcaccttgttccagataagtttgcgccgccaaatgtgataccaccgccaagtcataaatacccttacgcaagcattccaccctggcatctgaacctctcatgtgggcgaagtaaaatggaatgccctcaaattgcgctttcagcccgctcgccagcccttcgtacaatcgggtataaggcagcggcattgcacaaactacgttgctaatatcagcatgggctaacagtgctttgtgatccatactgaccaaatagctaccattacgccctcgtcgttccacataaaccgcgccagaactctccagtttttttaatgcaaactgaactaacccaacagataacccatagtcagatgacagctcttcaatcgttttcaaccgattaccacagcgctcacctagcagataacgtgccagacacgcttgagcaaccccctcttttttaagcagcccatgactcataataattcttcatttttttgaatatatttatatccaatttaagcaggcaaatgacaatcgaaaaatagtaaaaatgcgaatgaggtcacgaataaataggtaattttctgaaatttcaatgattttagtttgataattaataatttctgtttttatggtttagttgtggtcgtttctggacgcttaatcagtgcatagatcaatcctgccaacaaagtaccgacaataatcgacatcaaataacccagtattggtgtgatagcacctggaatcaacagcacaaacaggccaccgtgcggtgccattaattgcgcacttattgccatagagatcgctcccgtcaccgcaccaccaacgatacaacatgggagcacacgtatcggatcacggacagcaaagggaatcgcgccttcggaaataaaacagagtcctaacaccaatgcggctttaccactttcccgctgaacgttatcaaacttctgccgggcaatcagtgttgccactcccatagccagcgggggaaccatccccgcagccataatggccgccattggcgcgtaggtttgtgagctaagcaagccgacaccaaacgcataggcagctttgtttatcgctccccccatatcagcacacatcatcccgcccaaaatggctcctagcaggagtgcgttggttgtccccatgtgagaaagccaatacgttagccccgccataataccggcgacgggtttaccaataacgtaaatcataatcaggccagtgatcaggctagtaaatagcggaatgatcaagatcggtttcaatgcggccatactttgcggcaatttcactttgctgttaagcaacttcgctacgtaaccggcgaggaaacccgcaataataccgccaataaatcccgcgttcgtgctagttgccagcatgccgccaattaaaccgggtgtcagacctgggcgatcagcgatcgagaaagcaatgtaacctgccagtacagggaccatcagcgcaaaagctgagctaccaccgatttgcattaacgccgccgccaatgtacccgattctttaaatgcagtgatgccaaaagcaaatgacaatgcaatgcacaggccacccgccaccaccatcggtaacatgtaagaaacacccgtcaacaagtgacgatagataccggtattatcttccctccggtcagttttaaccttttgcccttccggctcgaaaagcttggcttcggctagcgccttatcaaattcttgcgctgttttcttcaacgccagcccggtagaggtacggtacatcggttttccggcaaatttcgccagatctacgtcaatatcggcaacgactagcaccagatccgctttttctacctcttccggcgtaatcacattacccgcacctactgaaccacgcgtttccaccttgacccaccaaccgcgctttttggcttcggtttcgatggcctcagcggccataaaggtgtgcgctacccctgtaggacaagcagtcaccgcgacaatccgttttgtatcacaactgatgtcagttgccggtatctgatacggcttggcgtcagcttttgcctgctgaaagaaatttttcggcgcatgcaatgcctgttccgtgtcaccgagataaacaagcttaccgttcaatgtgttatcggtggggatgcgactgccggtcacgaccaccaaatcggcctctgctggattttctgttagtatctgcccgatttccgccgcagcggcactgaggattgttttcaccagataacttccggcaagtccgagtgaaggatcaacgataagcagcattttcatcatgcttctcctgctgttagctaaaagggttgtagatcgacgtgcgccattatcacggcaaatgggggatttctactctcgcggcccctcgcccaaaccggaggccaccgcttcaccaatggccgctatcgcctgcggcgcatcatcaccattggcagtaatgtgaagccgatggccttttttagcgcccaatgtcatgattttcatcagactacggccgtttaccggttgaccggcaccatcaagattgatgagggtaatttcactggaaaattgccggataacattgaccaacacagcacctgggcgagtatgtaagccatgttcgttgcacaggacaaattccccgctggatatggtgctctgcgccagtgcgccgctggtcagtaatgccagcactgtcggcgcatcagctttcagcaaacattccgctttttgtgctaatagcaagttacttaggtggtgcaacacacttagtggttggtcgtcagcaaccgccaccgtcagcaacatcaccaccggctcgttatcccgcgtgaataatcggctcactgctacagcgctggttaagttaccgtcggggctatcactgagccaaatgccctgcccaagatccagtggcttactgttaatcactttgctgacaaaggtcgtatccacggcccccgctcgctgtaaccgcccggcattcaatgcctgtaatgtcatcagatcgcaggcattaacatctaacgtaatcaagctggtatcgaatttgaactcagactgctgaacttctcccattagcaagctatgcagtgcctgtgctgactcaatagtttttagctgttttgcaatacgatcatcactcagtaagtgtgttaactggcgcagtagtgccaaatgctcatcggaacgcgcggcgataccaataaccacataacacatcgcgccttgatcccattcaacaccctgtgagaagtgaaatacctgtacatcggttttcatgaccagatcacgagtatctaacgtgccatggggaatggcgataccgttgccaaggtaggtggaaatttgcttttcacgttgcaacatgccgtcaacataggcatcaccgacgttaccattcgcggctaacatggccgccacctggcgaatagcatcctctttactggtcgcaattgcgcctgtatggatattttgcagagccaactggaacataattttctccctattaccaaaaatagaatcgtttcagtttacgcagagaaaaaagcattaagtccatagaaagaaaaagagataaaaaactgaaacgtttcaacgagtgtggaacatgactaattttcattcaatacttatgtgaaataaaatcgcaattttttgagattactcacatttttccagccatcgttttttgtctatctccggtttaagagatttggtaaaccttgagggttctgtgaaacattttttttatcgacagagggaacagatttaaccgcatttataaatgtagtggtcaactcattccgaaacacttatagaaaagttagttttacagcgatggtaagaactctcaatatgagaatattaaacgtcacgctatttaagatggtctaagatggtctttatgtatacccgttatctttcaagttgcctctttgttggctgcacgcgctcaccccggtcacatagttacctatgctcccggggattcacgcccttgccgtcgcgatgcatcttgaaatccgtagggtatatgcgccttaacaggcgcatacatcagaatcgcttattcagttggacaaggattttcatttgggacgtaatcaaagtgtaattctcggtgccgattcctttttacaccccaaacaccgtggaaacgctctgcattactggcagtatagcgtactgtatggcgaatattactgtgcccaagataatcttgtatcaaccgagtatctatccccctatctgcaagcgcaaaaccacaggcatggcgcaacatgtgcggatgagagcctacggaaatattagccaatcgtcctaattgactaataagttgataaatgcgctggcgagtcagtgggtttccgctgcgtgacagaaacaaccaatcactttctgcccctcggaaggttttacggacttttagccactccctgatcgcctggatttcatagcctaacagaggatgaatagtagaaaatccgccttttaaacgccggatatacaaactgccatcttccaaatccagatcagatatccgtagatacctggcttcactaacacgtaagccatgaacaaaactcatgtataccagacaatagtcgcgctccccattagggccctttttcgccacttccagcattctttccacttcgtattgcgttagatgtcttcgctgacccattatggtctatcccaaatattctttgttgcaacgcatttaacacgctgcgttatctgtaactgattaagacccggaaccaaccctaaatcccccatagtaattaaacctgcgccagaatagcggcagatgactgtatgaaacctctgtttctgtacttgatctatgctcaagctgtgtaatggatagatattcaatgtctgttctccggtaatttccccctattcttaccatcacaaggccaaaagaaaaatagtgattcaattaaccgatccctacccaataaggctttttggctaaaattaccaacaaaaatcgctgcgataggcccaataaccattttaacaaaaggacgtgtccgtcagattgatgtctggttcaaatcactaaggaaggatgttgatgcagcaatgttttccggcttccagcttccgataaacatttaatctctctatacccgttatccttcaagttgcctctttgttggctgcgctcactcaccccagtcacatagttctctatgctcccggggatccgttcccttgccgtcgcgatacatcttgaaatccatagggtatatatctttgctagaagaaaccggcggggcagcaaatctaacaaactggtaacacgggtagacgatcctctatacagaataatctggtatatcagctagatacaatattcagcttttcaaactactaccagattttatccatatcgtcatcaatgatgccttttataaattttttaaacctcaatattatgacccattattgcccttctccgccaatcatttacaacaaaaattagtttgcgagcataatcacacgtttaaaagttacatgttacttttcccgttatttgttatttaaaacaatcgggtaagtgtcattttatctccctatgctgttattcttaatctgtctctttagttttatgtcattaaataatatccatagcagggaacaaaaatttaatgaaaagaatcattaacacattgcaaaaccttggcaaatctttgtatggcccggtgttaattctccctattgtcgggctgtttattgcttttggcaatgtattgggaaacggtaaccttgcagaatatcttccatttttaaaccacgggttaattcagcaatctggcaaactgatcgcccaatctgctatttcaatattgagcaatctggcgttgatttttgctgttggaatccctatcggactggcaaaacgcaataaaggttatgccgcattgatcggtctggttactttcgtcatttttatcaacgccatgcacgtcactttagcattacaaggaaaattggtgccagaaacgcaaatgcgcaatgttggtcaaggaatggtgctaggtgtgcaagtattggaaatgggggcttttgccgggatattgatcggtgcactggctggctattgctataaccgttattcgtcaaaacagtttaatggtgtaatggcaatttattccgggcactgttttgttgccattctgatgatccctctggccgttatatcgggttacttaatgagtgatatttggccctatgcgcaacggagcatcagcgcccttgcgcatggtattcatgagtccggggcatttggcgtcgctatatacggctttctggagcgcattctgatccccttaggtttacatcatctggtttacacgccctttttgtataccgaattagggggcattgcagaggtatgcggcactgtacatcaaggagctcgtaatatctatttcgctgaaatggcctgcccggctgtacatcaactcagtcacagcgtggtatgggatgcacgagggatcagcaagatgtttggcctgactgccgctgcactggcaatgtatgtgactgcccgcccagaaaagaaaagtacagcaaaagctgttctcatccctgccgccatgaccacttttttgttaggcgtgaccgaaccactcgaattttctttcctgtttgttgctccgctactatttggtgttcatgccgtgctaaccggtttaggttttatgctgttctatctactcggcgtacatgctatcggcgctaatggcataatcgacttcatactgtacaacttaccgctcggtaccgaaaaatctaactggccaatgtatatcgccgtagggctaatcatgtcggtgatttatttcttcgcattccgtttcctcattttacattacgacctgaaaaccccgggacgcgaaaataacgatcaggaaacacgcctctatagcaagcaacagtatcaagttgccaatgatgacaaaccaggacaacaaatcatctgtgggttaggtggtacagcaaatattgtcgctatcgacaactgctacacccggctacgcataacagtacatgacaccacgctcattgacaaaaacaggcttaaatcaaccggcgcaaaaggtgtcatctgtcagggaaataacgttcaggtaatttacggtctgcacgtccaaaaaatgcgtgaagccgtagaagaagcactttaacaggagcataaacatggctaacgcccctttcattttaactatcgctggcggcgggagtacctatacgccaggtatcgtaaaaagcctgatggtacggctaaacgacttcccactagcggaaattcgtttgtatgacatcgatactcaccgacaaaacactatcgcgccggtagtagaaaaggtgatacgcgaacatagccagacgattcgctttgtcgtgacaagcgaggcaaaaaccgcctttagtggtacccattttgtctttgctcagatacgcgtcggtcagtataaaatgcgagaacaggacgaaaagatccccttacaccacggcgtaattggtcaggaaacctgtggccttggcggattggcttatggtctacgtactattatgccaatggtgaaactgatcgatttagtggagcgctacgcagacaacgcttggatcgtaaattactccaaccctgcctctatcgttgctgaaggaatacgccgtctacgtccacacgctagcgtactcaatatctgtgatatgccagtggccgctatgcgcaacatggcagcaattttagacgtagatcgccacgatatgactgtcgattactttggtctgaaccatttcggctggtttaccaaggtatgggtgaacggaaaagatcatttgcctgaattgcgtcgccatatcgctcagcatggtttactgactgctaatgccgcacagacagatccgcaacatgccgatccgtcatgggttaaaacctggcgtaatatcaagccgctcatggaccattttcctgattatgtgcctaacccctatttgcaatactatctgatgccaaaccatattgttgagcaccaaaatcctgactatacccgtgccaatgaagtgatggacgggcgcgaaaagaagttgtttaaagcagcggctgagtttaaacatacagggattttacccgacgctttccatgtaggggtacatggcgcttttattgttgatgtagcatgttcactggcttttgatttgcgccaacgccatttggtcattaccgaaaacagaggcgctatcgctaacttaccttatgatgcaatggtggaagtacctgcttacattaccgctcaaggccctgaaccggtatgtatagggaacgtaccactgttccatcaagcgctgctagcgcaacaactggcttcagaacagttgttagtggaagcggcattagaaggtagctatgagaaagtgctgcaagcattcacactgaatcgtaccgtccctaccatgcaacaagccaaagcgattctggatgaaatgatcgaagccaacctgggttattggcctacgctaaatccagcctggcaccaaggtgaagcgatttaacccatatttaacctataatctgcctttcttacatagtaaagcagatttttatgcgagccggctcactatccgacaatcactatcttgaggagattaagaaaattcaccacaattcaattaccgaacagccgaacatataccctatgggtttcaagatgcatcgcggcggcaagggagtgaatccccgggagcgggagcatagataacgatgtgactggggtgagcgagtgcagccaacaaagaggcaacttgaaagatgacggataatcgattagcacccttattacagcacagcgaaagaataactcgcgcggaataccgcgtattatcctatttaaccgcgcatccattgttaattgggcaaattacagtacgtgagctggcaaaagctacgttcatttctcccgccactattatgcgtttatgtcagaaactggggttcagtggctatagtgaatttatttggtactgtaaacaattactgtccagtggaacgtctatttccgggaatattcagccccatcatactgagataattcctgatgcatttgaacacttcgtgactaattaccgtaaaactttctctttaattacaccagaaaaaatgtcacgctttagcactctgctacgtgagaaagagaatttttttctctatagtgccggtttctccagactatttgccgattacttgacgcaaaaattgcaaatattagggaaaactgcttttaaatccggcccaggagatagccgtaagattttcctaagtaatgcggtgaaatatgaagtttttattgctatctctcgcagcggccagacagaacaagtattggataaagtacgcattgctcataatgttggtatgacagtcattgcatttacccgctcatctgctaatccattagcttcactggctgatgtgcactttgcactgtatgacgaggcaatttatttcgatgcagaaatcaacgaaataacttcattcgagtctaatctgatcatgctcattgatttactattattacaagcaacgtcttaattcattgagtacaagccatacaacatgatctcgacagacaaagaaaaggaaaataaaaacagaaaaagagatgttaaggattaaatcaaacctgtataaagacgatttaaataatttcagaactaaacaatattaatgcttatgtttttttacatagaggtatttttttacatagaataataagccatttaattaacagatatgtgtaaaaatcgataaattttatttctctacgaattaattattgcaatctcttatataatcaggttattttaagtgtaatcattaaaaaaacgtttcagataatgatttaaagactcattaaggagttgccatgttaaatataaaaaacaaacaaaataatatcactccgcaattagtttacatgtgggaaaatagtcatgatctttgggaaactaaacattgccggtcaacatttatctatgcaaatccgtttttttgccaacgactcaacttatctgaaaattctgatattatcgaattttcagcaagtgagttacccttgcctattgcaaaatatgaagattcaggaagttgtattaatactctctttgataccaataaagcaaaagatttttctctaacctgtctgtgttttacaaaaatacatcggccaaaaacaaaaagaatataccctattgatttcaagatgcatcacggcggcaaaggagtgaatccccgggagcatagcaaactatgtgaccggggtgaacgagtgcagccaacaaagaggcaacttgaaagatgacgggtatattgttgccttaacgatgttgatcgcgcgcgacacaccagaaaaatttttgccacaagaaagtattatattttcctaaatcaaaatattacacaaatatgactagaaaaaactcaactacctcgttacaaataatcaacacattggcagcaagcaatgaaccgtggggagtaaaagataaatcttcctgtttcctctatggtaatgatgcattaattaaactccaaaatataaatgccaactatgattatgaaggtaaatatgatagtgatattccctagaggggcaatgaatttgccaaagattttattacacatgatttgcaggtaataaaaaatagagaaagtattttatcattagagacacatgtatttggacaagataaagttttatcatcttatttccaagaaaaatttccactcgatgatgataaaggtgaatgcatcggtattcttttccatgcctggaaagttcaggataattcactgactcggctatttcacagtaaactacctccttctattatgtttcaatcgccgactcatctcttgactgaacaggaatgggaagttgtctttctttttctacaaaaatacaataggacacaaatctgtcaattactcaaaatttcagataaaaccatagaggaatatataagaaagatttataataaattgaaagttaactcagactcacaactggaggaatattgccgactaaatagttttgatctctatgcgccaaaaaggttcttattgtcttacttataaatatcgtctatttattcaaattttttataccctatggatttcgagatgcatcgcgacggcaagggaacgaatccccgggagcatagataactatgtgaccggggtgagagaatacagccaacaaagaggcaacttgaaagataacgggtatataaggtaataatgttataaaggtcaaatatgagtcaatcaggatgtaaaaaagccccttttattactcctcaattaactaatatgtgggataaaagctcagaaccatggtttgtaaaagataaggagttccgctttatttatgcgaataaaatgtttattaaagctaataagctacctgaaaatattgatattattgggtataccgataaagaattaccttcgccagttagtcaattctctcatctttttgaggagcatgatcataaggtgttacagggtatgcaacgaatatcatctcttagcacttaccctcaagcaaaaaatgaacaagccacatcctatttctgtgataaatatccgttaatggatgaaaataaacagtgtattggcataattgctcacgcaagagaaatacataactttactgtatctcattatatggagaacaatatccctatatcaattcgatttcaaaaacctaacaatatattaaaagagaaggaatggataatcatttttttattctgccgtggcgttagtaatagatatatcgctgacgaaatgaaaatttcatatcgtactgtggaaaagtatttcgaaagtatctatgagaaactatcagttagctcagcaattgagttaagaacactttgcaaagagaatagttatgatctttatattcccccccaataccttcaatctataggccatattttgctataaataatcgatttcattattacatatttctctctgacctgtttaattaacctgaattttacttaaattccccctaactgatatacggataacaatttgataaatcaaaataaagggctaaaaacgtgactaaataatcatttttttgaaaatttacttttctatttctgttgaagactttatataaaaaacgatgaaaccaagagattcccatgagcactgacaggtgctttatcatggtcgaatggtttacatcaacatcttgccaagaaacagggggcttataaccctgtttccattccaagatccagatacgccacaatcaacgaacaataatacctaacagaattcccaatgcgccaaagtcagcatcactgaatgtcgtgttagcaatcccgatatcccccaaaacgggtaacagaaatacgggtaagaaggtgatcagaaagccctgagcaaaagccccgagaatagcgcctctacgcccccctgtcgcattaccaaaaaccccggccgccgcaccaacaaaaaagtgcggcacaacgccgggaataatgaccgtcataccgagtgcatacagtacaaacataccgataacgcccgccacaaaactgctcaagaatcctaccaatactgcattaggtgcgtaaggaaagacaaccgggcaatctaatgcaggtttagcatttgggaccagtttgtcagaaattcctttaaacgcgggaacgatttctgcaatgaccattctcacaccttgcagaataatgtatacacctgcggcaaaggtaatagattgcattagcgagaacataaatccatttttcccaccactgacttctctcacaaaatcaccgccagcgaataagcaactgatcatgaaaataatcgccatcgtaaaagagatagcaaccggtgtatcacgcagaaacagcaaacttttcggaacattcatctcttcagttgagtgagccttattgcctagtttgctgccaataaagccagagagcacataggaaagcgaggaaaaatgcccaatcgcaacgtcgtcagaacctgtcactttcttcatatatggatgggcaatcgccgggaaaaaaaccatcgcaacgccaacaaccacagaaccaatagccactagcatcgaacccttgatcccggcggttgccagaatcaccgcgaccatcatggacataaataatgtgtggtgcccggtcagaaagataaatttccacggggtaaaacgtgcaatcaggatattaatcaccatagcaaagaacatgatcattgccatttctttaccaaaactcttttgcgcaatagaaacaattgcttcgttgtttggtacgactccctgaataccaaaagcgtgttggaaaatttcagcaaaaccccccagtgacgagacgactaacccagcccccgcccccaagatcaaaaaccccataatggtttttatggtacctttgatacattcagtcaccggtttcctttgcacgatcaaaccaacaagcgcgataaaccccaccaaaatcgcaggttctgacaggacatcactcatcagaaaatgaaaaaattccatgacaacctcccggttacagtgcaccaagttcaactaatgccacggacagacgtactttcattgccgatttatccaccatattgtccagcgcaacaattttgccatcgactgcctgaataaccagttgttctgcaatatctttagtaccgacaaaaatatcgctttgagttgcttttgctgatcccaaatcgatgtgatcaacactggcctctactcccatctctttcagaatatttttgatgctcatttccatcatcaaactggtacctaacccatgtccgcaaacgacggtaattttcatactgtttccccatagcaaaaaatagcgacttaatactggctaatcacggcaagaatctcttctttacttttggcactcatcagcaatgcgacatcctgttgattatcaaacaactcagcgagctgagcgatcacttcaatatgactattgctgtcagttgctgctaaaacaatcaacaatttgatcggatcattttcctcagaaccaaactccactcctttgctaatcacagttaatgctaaagctaatttattgaccccttgttccggtctggcatgtggcatagccattcccggcccaacaacataatagggaccaattacctcatgcgaatgataaatagcatcaatataacaagcagaaatagcaccattttccaccaaaggctgacaagcaatcgcgatcgcttcgcgccaatttttaacatccggtatcacttggatcacatcttgggtgagtaacgtctttagcatcgatccccctaattaaaatctcactccgctctacctgtcttctgctagtgatattagtcacaaatgatagcgctatctatgatcgtagctcataattgtgatagcgctatcatttgttatttgattaattcaccagcaagcgcaagtacatcatggttttttcccacgacttgcctgagatcaggtagaatcccatcgtcaaattcatagccgttaattaaaaaaatagaaaaatattttgatgaaaaagacacgaaaacgccgtaatacagggcgagtaacattacaagatgttgctaagtatgccggtgtcggttcaatgacagtttcacgcgcattgagaacaccagaaatggtatcggataaattacgagaaaaaattgagcaggctatacaagaattgggatatatcccaaatggcgctgctggcgtacttgcttcgggccaaagtaatattatcgcggtacttgtgccctcactgacagataaagctagtgctacgtttatacaatcactgcaacaagtgctgaataaacatgcctttcaagttttgcttggatgtcatgaatatgaccataataaagaagctgaaattatcatgacattactgcaaagcaatgccgcagcactggtgattttcagttcacaactggcagataaaacctacagcaatatttctcatatcaatattcccattattaatgttgctggctctcatcaacagcagacggcaattaatatagaaactgatttttccgcggctgcctatatgttgactgagcatatgttgaataatggccgcaagcatatcggttatattggtgcccaaatggatagccgtttacgcaatcagcagattaatggctggcataaagccatgcttcatcactatcagaatgctgaccaaaatatcactacctcggatactgctagcatgcaatttggtcgccaggcaattactgaaatgttattacgtcaacctgaactggaaggtgtgatttgcagtcatgaagtgattgccctaggtgtcatgtttgaatgccagcggcgtctacttaaaatacccgctgatttggctgttgcttgtctggatggttcagataactgtgaccacacacagccaacactgacatcaattcgcattaattatccccaaataggcagggacaccggaaaattactgataaaactgctcactcaacaaggtgaagatgaaacaaaacatcaaaacaaccgatatcacctattttcatataagttcgagcctagacaaagtgcttagcaaaatgataacgccatgatgagacatcaattgccattaaagccgctaactgtggtaactattttatctgctgactgagatcatgtggcgcgaaaggaaagcccgcgcaatcctcaaccctattgactatgtcagccaccgtcgtttcagctaaagcggtttctagcacacaagtaacacgcgagaattcatcttctaatactggggtgatattgtgcccaatataacacttgggattaggtttagaacggtgcaacgtaaagtacagaggatcttcaactgcgcgataaatatctaataatgagatttgattcgacggccgggcgagtaacgctccgcctccttgccccatttgtgaataagtcagaccagcctccgcaagggcacctaagagccggcgaacaaccgtcggattagtattcacgctttttgcgatatcttcagaacgcacggcttgtccgtggtgaagcgcaatatcggtgagaatatggatagcaacagcaaaacgggtagatgttggcactggaggatcctgtataccttaaaggatgttatggaagaatagcagagcgtgaataaaaagaccgcgtagcatgtcactaatttcgtcacataacaagaagtaaaattcagaatgttaatttgtctgattaacattcctactcctcccgttttgccgccgtatgctattgtttggctcagttaatgttacaaacatgatagcccatattaccgaatggaataatcggtatgagcacgctcaatttgaagcgtatcggcagtttgttgtaatttaactagctgcccatcccgcactgtccatatatgaacgaaacgagcaatgaatcgtttgccacgcttcacccgtcccaaataattacccagaacaatgacatgatcatttgactcaaaatattcagaaccatctacaacgaattcatcaacatcattaagaagtggcacaaagaaattattcaatatatcttcaattccttcataaaccccaccataccgagatccttcagtaacatcccaaataacatcactcgccataatctggcgaagaacatcaatatcacccgtagagtcataaaagcgacgaacaatagatacatttaatgaatctgacattatcattctccttcaaattatcctgcaatgaaatatggccggctcttataaaatgagccggccggatatcttgggacgttcaaccaaaaagcgccattaaagctttaaattaacatccccggaaaacaattcgaacatctttcatgttaggctatccattgcgggtaagatatccccttacttaggtaagcgctggataatcagtatagcctatagcaccaggaaccataaaagtttccggttgttgttcattaaatggcgctttaactaaaaaccggtgaggtaagtctggattagagatgaataattgaccaaaagccactgcatcagcccgaccgtcagcaagaacttgctcggcactttctttagtcagttcctcgttagcaatataggttgacccaaaagcctcttttatcaccttacttaagtcaccatcaacgacagcatcacgtgaaaagataaaagcaataccacgtttaccgagttcacgtgcgacatatccgaatgtcgccacaggattggaatccgccatagagtaatggccaccacgtggtgccaaatgcataccaacacgtgatgatccccaaactgaaatacaagcgtctgtcacttccagtagcaaccgggcccgattttcgactgaacctccgtactgatctgtccgcagattagcattatcttgcaagaattgatcgagcaaatatccattggcaccatgtatttctactccatcaaatcctgccgttttcgcattttccgctccgcgtctgaatgcttcgacaatgccgggaatctcctcagactcaagcgcctgcggaaccacgaaaggacgttttgggcgtaataagctaacatgaccatcagccgcaattgcacttggtgccaccggccgttctccattaaggaaaacagggtccgatatccgccccacatgccaaagctgtatgaaaatacgcccaccagcagcatgcacagcatccgtgaccaaccgccaaccagcaacttgctcatctgaccaaatacccggcgtattctcgtagccaactccctgcggagtgactgaagtcgcttcgctgataatcaaaccagcagaagcgcgctgagcataatattccgccatcagcgcattagggacacgcccttctccttctgcacggttacgtgtcagaggagccataatgatgcgatttggcaagtcgagatcaccaatgcgaattggatcaaaaagtgtaggcatattttttctctcatatagattaataaatgcacttcgttgcaaatcatcaataactgcatagccaggtcataccagaaacaaacagtgttaattaggaagtgtgaactctttctcttgattctgttcccgagtctttagtagcaggcggcttctctggcatgaatcaatgtaacttacacagttacatattgcaacaggataaaaatgtcagatgccagaatatctgcaagataataatgttatgacacaacaatgactttgcttaagaatgacataggccatttgtcgcctttgatttaagtgaatagaaattcgttgaatgagtggtataaaaaaggctacgcaatacgcagccttgaaacattctttaatgaatagaacccctatccaatgagttttaaatccgcttttctgtgtcgcttttgttcctgataaaaattttcatgagagccaaagttcagcaggtataactctattttcccttcaacccaacaataaccaagcaatgttaactggttatttaactgaaagttatgaactcgaaggaaacttaaatcacctttcttctgctcaccaatttcagggttatcaattattctatcaatctcatcttctactatcctaagaagatcctcagataacctggataatgccttagaaaaacgtcttgtttcataaacatcaatctttggatctttttgtccttctgacataacgcgacaccttaccgctattgacttcgctttttgccagtaaagaatcaaggataaaagagtacggcaaatcagggttatcctccgcaatgcggccaatcttagcccaatgctcgatttgcttaggtacacttctgcttgaagcttctgcatgaatttttacatcattcacgaaatcatcatccaaacgtatactgatagccataatttagtttacccctctgggattttgtactccatgcgatataaaacgcatctgtataaaatgcaacattttatcgcattatgcaatcattgattacgatttcaacatgtctattcccgtgatacaaaagggaccccctcaaaatcccctgctcaacgtaataaggcacagcaagaccaattttattctcatcctcaataaaactggtctcattgaattgtcaatatcgcctgaatttcggacatatgattcagaaaaatcgacttattccccctttttgaggattaaatgtctgaattccagcccgattaagggacaaaaaagccaagcaatgcgcagccttgaaatattctttaatgaatagatgcaataaattaagtttgaaaatacgtgatcccagttttatcttttttagcctcctcctatcaaaaattgattatgattataaatgggttgcctgatgctggcagactgttagttgatatgtaaaaaattgttgcccggaggatgcatatatgaatttattggatggtttacaaaaaaaactggacggttactttaataaaacaagtgaaatcaactatgtaaaaatatttgatactccccaaatatgggggcttccttttggaaaagagataatgccacaggcggttaaaagagcagcggaatttgaagatgctattgtaagcattctggaaaacatgcgttatcgctgtgatatttcctctttaaatgccccggatgcagagtggagaaaagttatcctatcagctattgatagcgcatttaccaaaaaaataaacaggaaggagagaactcagataaggttcttattcgctcaaacaccgacatctttgttaaacggtgtaaattcatactttgaaggtacccctgaatatctggcattgaaggaggatattattaaattaattcaagaaaggagagatcattgggagtgtgtacctgaaatatggattggtcggttttaccggatagtagacggacttaaagtatcattagagaagaaagtactgccagaggaaatgtttccagaagatgataccagaatgacatggaatcatacaaaaattatcgcagttgatggaattgagtcatttgtcggcggccataatttaaatatggatctgtttaaaaattaccctccagttcatgatgtctctgttaaagttataggaacggcatcattaagctcacaattatttttaaataacatgtgggtggctgatacagacctcttaacaaaagaattctttgatatagataaaaatagatgggttaatgcaaatggtattgtgggaaagccggaagatccattaaaaaaagagtacgttactgaatatatcgatagaaaaaaagaagagagcctaaaaaatccacctaaagacccagaatataagaaaacaagcaggatattatccgtaggtaaatattggtctggacctgatatgcgaacggattataaaaaaggctctgaaataatgaaagagtttataataaagaatgcaaagaaaaaaatccgcatgtcccaacaggatcttgtcagtgcatggaaaaaacaatggcgagatcatcatgtgtgccgatggttgatcgaagcattacttgccaaccccgaactggaagttcaaattgttgtatcgccacttgatgcagcagccggtgctgctggtgatcaatattcttttggttctggagccaaaagaacgtttgaaatatttaaatactatttgacacatgatgagcataccgataagaagctggaagatccggatggaatcaggcaagccgcactgaaaagaatagaggttgccccttttttctttacagacaaagtacctgaagatcttttgattgaagggacgacatacagatggccaaccccggatgaaaattcttatactgctacgctaaaagaaccgtctctttctgaaagacctccacagataggtgctataggacgcccattccgatccttaattaaagcaagtggtccggtatatcccaaagttccccctgctcctgggaatcatgcaaaagtaacaataattgatgatgaactctacgtggttggttctgataatctctatccggggtatctttcggagttcaattatcttattgagggagaagacgcggtgaaagcttttatagaatcctactgggaaccgttgtggaaatattcaggaacacattcatttaattacaaaaatacttgatgtaaataacaagtgttctgatatataccctatggatttcaagatgcatcgcgacggcaagggagcgaatccccgggagcagagataacgatgtgaccggggtgagtgagtgcagccaacaaagaggcaacttgaaagataacggatatattcccgccaactgctagcgggaatataacttgaaaaacattaaagaaatgacttttcaggagaccaattagatcttggctgtcgccaaatattttgtcatttcatcatcgggtaccataccaccaccggttgcccagaccaaatgcgtagcctgtttcatcttttctgctgaaaggttcttattgttcaggtaatcaaggtttccactcacacgagcagggcccgccatcccaactagcgccgaaggctctaaccggataccttcatcacgatccagtaagcccaacaggttatacatttcctgatcttgaacagtataaaatccatccagcaaacgttccatcgcacgcccaacaaagccggaagccctgcctaccgcaagaccatcagcagcagtgatattgtcgatcccgatatcctgcacgcaaatattgtcatgcaaaccagtatatacccccaacaacatactgggagaatgggtcggttcagcaaaaatgcagtgcacatgatcaccaaaagccagtttcaatccaaatgcaaccccccccggaccgccaccgacgccacacggcaaataaacgaagagtgggtgatcttcatcaaccacaatattcatctgctcaaactgcgcctttacccgtccacctgcgacagagtatcccagaaacaacgtttgggagttttcatcgtcaataaagaaacagttaggagcagattcggcttctttacgccctcgggccacggctaccccataatctagctcatgctccacgacattgaccccatgtgaacgtagcttttgcttcttccattcacgagcatcggcggacatatgcacgctgacattaaagcctaattttgcactggcaatacctatggaaagccccaaattgccggtagaacctacagcaatgctgtattgattaaagaaccgtctaagctcttctgaaaacagtttgctgtaatcatcgttttcagcaagcaaccccgcttgtaatgccagtttttccgcgtgagttaacacttcataaattccaccacgggctttaatcgaaccggaaatgggcaaatggctatcttttttaagcaaaattctccctgtgatacccacaccataatgttgctccagtgttttttgcatcgtaggtatagccactatttctgattcaataatgccatgtgtgacggctgtttctggaaaagctttacataaataagacgcaaaacgatccaagcgtgcttcagcatcctcaacatcatcagcgcccaaaccgacaaaaggcaatccctctttcaaggtggtattacaagggttaaaccagaagatttcctctaattccatcaaattttttactaacggatattcatttagtaattgttgaatttcagtacgtttcatatatgtattaacccaagataagtgtttccctggtatatacccattatctttcaagttgcctctttgttggccgcactcgctcaccccggtcacatcgttatctatgctcccaaggattcactcccttgccgtcgcgatccatcttgaaatctataggatatataaaataactcttacttgcttgattattagaattttttattatattcaatatgttatgtttactacaacttcctacaatatatcagcacatcatactttacccgttatctttcaagttgcctctttgttggctgcactcactcaccccggtcacatcgttatctatgctcccggggattcgctcccttgccgtcgcgatccatcttgaaatccattgggtatttatttattttttatcttccccttattttgattactacgttaatgtttatacccgttatctttcaagctgcctctttgttggctgcactcgctcaccccggtcacatagtttgctatgctcccggggattcactcccttgccgtcgcgatgcagcttgaaatccgtagggtatatcttatttattattttagatgtaaatctgcctattttataggcttccctggtattgacacttcgcacttcttattcttatttttcaagctgagcgatgacttctttccattacataatggtagccactacacgatggtagaaagaagaaacgtcccaaccaacgcaaccacagaggcaataaatgttgcggttgtataatacttaaaagtttcactgagcgttgttccgcaatattgcttaaccaaccaaaacagtgaatccgtcacaatagtacagccgatagcaccagaaccaatcgccaatgtaatgatttcagggctaatatctggatataacggcaacataggcgaaacaatcgctgttgcccccatcattgcgaccgttgctgaaccaaccgccgcatgcaaaataatggcaaccaaccaagacaaaagaattgggtgcatatccagactcgacaaaataacggccaacgtatcactaaggccactgacttttaaaatactattaaatgccccgcccgcgccgataattaataaaatattggcgatagaagagaaacaatcttccgtcttcgtcaacagtgtactcattcccatattttgcttaatgcccaaggtgtaataggcaacaaacgcggcaatgaacatggctgtaataggattaccaataaattccagcaccgtataaaacgtggtacctttttccatatttaattcagcagccgttttagtcaacattaacccaattggcaataacacagtaaacaatgtcatgcctaaagagggtaaatcctcttcttgacgaactgcaatttcagaaaattcagccggaaccgatttaaaaggcagacggctaccgagaaatttcagaaataatggcccccccaccaaagcggcaaacaggccaactatcaacccataaacaatcaccgagccaatatccgcacccagtttattcgtcacaaataatgcagccgggtgcggaggaataatacagtgaaccgccatcaacgctgtacataatgggatcgctaatttcagcaatgatgtattggttttcctggcaatagaaaatgccaatggaattaacaataccaccccgacttcaacaaacagcgtaataccacaaaccaaaccaatcagtaccataatgatatcaggtgatagccatcggcatttttgcaatgtgataccaatccgctctgccgcgccggatatctccatcatcttaccaagaatggtccccagaccaatcactacggctaaaaaacctagcgtatctccgattcccccttgaatggcgttcaccatttcaacagggttcattcccattaaggcaccgacataaaaactggctaacaatagagcaagaaaagggtgaatttttaatttaattatcgtaaatacaattaacgcaatacttgtgagtaacgtaccaatcacccaaggttgtgaatccacttaatcattccccacagttaacctttgttcgtcacgcgaattttcattattgaatatgaatattcaatttttgacaaatgattaatacatagccatgcatgaatcagattgagccaattcagtgataccgatcaaaattttcactttatttgcgatttaaatcactaaaactatctgaaacataccgccttaatgatacggttatattatccgtcgtcgatgaactagaaacacgataaatatgtacacagatgataatttcatggttgtaaataagttactcaatggaagccagttatcaaagctgcatacatttgagatagccgctcgccactgctcttttgttctggctgctgacgaattagctatcactgccagtgcggtcagccatcgaatcagttctctggaacaagagttaggattcaaacttttccagcgttttcacagaaaaattgaattaacttgtgaaggaaagcgtttattttggacaattaaatcaacgctggaacacctaaatcaggaaattctggaaataaaaaatcaggagttatcgggtaacctgactatttactcccgcccgacctttacccaatgctggttagtgcctaaattagctgattttaatcagctatacccatccattaacctgaacatcttagtcggtaatgaaaatgtgaatttccgcggttatggtatcgatcttgcgatctattttgatgatattatatccaatgaattatcacatcaatatctgatgagtgagtatattaccccggtctgtagcccgcagtatgctgaaaaacatgatctaatgggaaatattgacaatctacgatactgcacactattgcatgataaacaagcatggagttacgactctgataccaaagagtggaatacttgggcagaacactttgacattacactggagccatcacaaaagtgtattgtcttcgatcgttccgatttagctgccgttgctgcaatacaccatgcaggtgttgcaatgggaagaaaaaatatgatttgggaaaaaattgaaaacaatgaattagtcgccccctttcccaacactgaagtattatgtaaacaatattactatacctgtaccctgcctcaacaacagaatgagaaagtcaatgcctttatccaatggctaaaatcaactatagacgaataaaaatatagccaaccattaacggatataacaaacctgctctattttaagtggcgacatgttagtcgccacagaatttagcaacggattctaccgtactttcaatcctattatttatacccgttatctttatcactatttctgtccttaaaaaatcagtaataatgtaattatttgaaaataacatctaaatttaatcaaaaaatatatactcatggtgtaagttatgatattcatcacaactgctagtaagcaaatcgtttaaatgcgttataaagtcgtttattttagaagtatatagagtgtaatgaaatgcaaaaattgttattaagctgtggagttatcttttctgtatctgcgataactttacctgctcaagcagaacaacatacagcttcaatcggatacgcctacgtgaaaccacaagatgtaagtgcactaaatggtgcaacattgagttatcgatatgaacttgatgatcaatgggggctattatcatcatttacctttgctaaaggagatgaaaaagagacaaaatattacacaggggaggacttgaagtactattctgtaatgattggcccaacctatagaattaatgactacattagtttatatgggcaactcgggctatccagaataaatgataaatctactgcccactatagtggtggatatatcgagaaggaatcaacaagcaaaaacactttaggttggggagcgggctttattatcaacccaacaaccaatacctcaattactgccggttatgaaggtagccgttttagtattaaagacggaaacgagaaagatcatttatctactaacggttttaatataactgtcggctatcgtttctaactttacccaatggatttcaagatggatcgcgacggcaagggagtgaatccccgggagcatagataacgatgtgaccggggtgagcgagtgcagccaacaaaggaggcaacttgaaagataacggatataatcaatgagcaatgtatcatcaccaaggttgaatattttattcgattgacaaccttggtgatttgtctaaatattaaatcgccataactatttataataaatccattgaatattatcataaaaaattgaatagatgaaagaaaaataatttccaaacgttgaatatatattattcaaatatatttttatttacaatacttttgattttttatttccatcaacaatataaaaacagttaatcttctgatctaataaaaacatatcattattctttatctgaactagactatggttgatacaaatgacaagaaatcatttatacaacaatttaatatatttataccctaaagatttcaagatgcatcgcgacggcaaggaagtgaacccccgggagcatagataacgatgtgaccggggtgaacgagtgcagccaacaaagaggcaacttgaaagataacgagtatattataaatcaacattatttaaggaatatatatgagccagaaaaatgattttaaggcgttttctattgataacaatgctaatgtagtgagccaagaaagatatgaagaaagtctgaatttgaataccggatttcaaccagataatgttcccactcacttgttaaataaagtattacgccagtcttcgacgatatcatctgtggtagctaattttatcgcaacacaatctaacaatgatattctggatgatggaaatataactaaacttactacacaattacataaagcattagaacaaaaagtcacaacagcaataccaaatgcctcattaacccaaaaaggcgttgtccagcttacaaatgttgtgggtaatgatgatacattagctgttacgcaaaaatttgctcagaatatcataaattcattgaatgaaaatattaatggtaaagtacccaatactcgtaaagtcaatgggaaggtgttatccagcgatattaacctaactgccggggatgtaggaagttacgataaatcagaatcagacgagaaataccaaccacgtggtaattatggtagtagaaacacggcttctttaagaactacaaatggttggtggcggtgtggtgatactgggctaatttatcaatggggacaatctcctgaggaaattgatgaaacatctaatatttattatttccctattgtatttccctctacttgtgctatcggagtagcaacacccgatcatcataagatagaagctggtgtcatttccgcatattttaaaattatggataatgcgagatttaaattaactcttgatcaagcttcaaatgatcaatcagctaaagttttttggtttgctattggatggtaaggaaatagatgtgtactagctcaagactgaattacaaaattgaaagttaccgatgatttataccctaaagatttcaagatgcatcgtgacggcaaggaagtgaacccccgggagcatagataacgatgtgaccggggtgagcgaatgcagccaacaaagaggcaacttgaaagataacaggtatatacagacttcaaatgcaagagctattacctgtatgatatgacaagaaacaaccactgtaagagaaattcagaagatatgtgtatttatcaccaaatcatcttaagagcatgcaaagaatattaaatcagagattatgacatgaataagttacatagaaaaataagttgtcagtgaaatatttacaactcattcatttaattggtgggttgtcgggggctcgaaccccgggccaattgattaagagtcaactgctctgccgactgagctaacaacccaatatggacaattattccccgatacaaagctgtcgtcaatatattatggctatttttttctcggcggagaattcatacccaattccaacagcattaacaagttaaattgtaaccaatttgtttttaaagtgagatcaggctgttattactatagtaatctgtgtcacaatattttttgcaaacatcatcatatataaggccacttaaagagccgtaacaatttacctaagaaaatattggacactattactatggcagaaaatatacacacttcgctttccactaaaaccggggaaacgcagttgcaacgcaatctaagcaaccggcatatacaacttattgctattggcggtgccattggcacgggtctgtttatgggatcagggaaaacaatctctctcgccggaccatcgatcatattcgtttatatgattatcggtttcatgctgttcttcgtgatgcgcgcaatgggagaactactgctttcgaacctgaattataaatcattcagtgatttctccgccgatttgctcggtccttgggcaggttttttcgtcggctggacttactggttctgttgggtcattaccggtatcgccgatgtagtcgcaatcacttcctatatcagctattggcaaccagactttccacaatggattacttccctactctgtgtttcactactgctctcccttaatttggctacagtgaaattattcggggaaatggaattctggttcgccatgataaagatcgttgccattatcgctttaatcgcaacaggtgctgttctaattggcatgcattttcaatctccagccggtcataccgcttcactggcaaatatatggaatgatggtggattctttcccaaagggttaagcggattttttgccggatttcagatagctatatttgcctttgtgggcattgaattagtcggcacggcagccgcagaaactaaagatccaatgaaatcgcttcccagagctattaatgccatcccgattcgtattatcaccttctacgtgctggcgctgataattattatgtcagtcacaccgtggcgttcaatcattgcagacaaaagcccttttgttgagctgtttgttctaatcggtttacccgccgccgccagtatcgtgaactttgtggtattaacctctgccgcctcttcagccaacagcggagttttctccaccagccgcatgctatttgggttagcaaaagaaggtgatgcaccacagcaattcagccgcctttcacgccgttctgtacctgcatcggggttaatcttcacctgtttatgtttatcctgtggtgtggtgctgatttatttaattcctgatgttatgcatgtatttaccctagtaactaccgtttcagccattctgtttatgtttatttggagcatgatcctatgctcatatttggtttaccgaaaacgtcgcccggcattacataaggcttcaacctataaaatgccattgggtattatcatgtcatgggtctgtctgacattttttgcatttgttctgatcttactcactttacgggatgatacccgccaggcattaatcatcacgcctgtttggtttctgatcttaattatcggttttcaaattgtaaaaaaacgtagaacacgtttgtacagctaacttattcaaatctttaatatctatatgacctgttggaataatactccacaggtcttttttattgctgcaagctgaaaaattaccactacacttaactccatcggttaagaaaatcttccttacaaaagcattaggcaattttcataacgtgagcatttcacctcattccatcaataatatttacccaatggatttcaagatggatcgcgacggcaagggagcgaatccccgggagcatagataacgatgtgaccggggtgagtgagtgcagccaacaaagaagcaacttgaaagatgaagggtattgatgaatttaaataacaggctgctattattgtaaacttcgcagccactttttaaccttgtaggagaaagtaatatgacaaaaattcttgtgctttattattccatgtacggtcatattgaagcgctggcatccgcagtggcagaaggcgctaaaaaagtcgctgacgtagaagtcacgattaaacgcgtaccagaaaccattccaccagaagcatttaccaaagcaggtggtaaagtagatcaatctgctccggttgcatccgtacaagagctggttgattatgatgccataattatcggcaccccaacccgctttggtaatatggccggccaaatgagaaactttctagatcagaccggtggcctgtgggccgaaggtaaactgtacggcaaagtcgctagcgtcttcacttccacaggcgttggtggtggtcaggagatgacgattacttcaacctggacaacgctcgctcaccacggctttattattgtaccaattggttacggtattcctgaaattggcgatatttctcagatgcagggaggaaccccctacggcgccagtactattgctgacggtgatggttcacgcatccccaacgaaaatgaattgaagatcgcccgttatcaaggtgagcatgtagcaaagatcgctaaaaaactgaaagattaacatgataccaaggcgaagagactgagctaacgcgccagacgctggagataagttttactaatgcgatgcataaacccactttccggatcggttgtgctcaccttcgtctttttcttccatccctttaaagaaatctggtgcactattcttatcaacaccatgaataacaaaaacatttttggcgctactgcgccagaggtcatcaccagtcagattgatgtgctcccatcccagcggggacaggcattgtaacagttcgacatcaatagcctgaccgtgttcacgtaaaaaggctgaaccgaaaaatgatgagccattccaaatgcacgataaggtcatagggacttttattgaacacgaatattacatttgataggcaatctaacttttaaatacataaccatattattaaacttttttattttaattttattaaagtcaaatttcagttcataagtattttctttaaataaataaaataataaactaaactaaatttttagattaaaatatttacttttgtcattaaagtccatgtaagcaaacatattttaattgtaattaaataaaaaaggttttcataacattaaatatatagttaaatttaatttaataaatcaccataactaatggataacaatatgttattaaatcaatctttagaagaaaataaattacctaactcagaagttcccgctgccactttaaatatattaaccggccaagtgcaaggagcagcccgttcagcgggaatctttactaaagaagacctcattaatatcaaattatatgttaaaaatggcttggaacttccttttactttgccgacggtaaaggaatatattcattacaatgatactaatattgagggtttgaaacctgaaaatattaagactttatttgaagaaattcataaccatgcgcttagctggagtaaggtagaagataaagtccaacagcagagtatcgatctggaaaatgcaggaaaacaaattacccaaaagggagagtcaataatcaaaatcattgaaaaaatgccgattacagacagtatagaaacattaaaaaacacatacaataatcgcaaaccaaccaatgagcaattattcaaaataacttataccgatgttgataaaaaagtagcagtcggattgaaaagtatcctagaaagcatggagaaagatgtaaaaggatatagggagaatagccagcaagttaaagatgcaataaccgactttaaaatcacactgtttggtggaactttatcagatggcaaaacagctgatggattactgccacaggttgataccaagaaaaaactgatggatgataataatctttctacaactgtcaaagagctgcaagatgagatcaatgagaaaaaaagagatattgagcaactccaaaaagactatgatcaatatgttaaattgtcattgtctggcgcgattagtgttattggcgtggtgattaccggtagtatttttggtcctaaagcagaaaatgcgcgtaaacagaaaaatgaattgattgagaaagtcaaagagttacaagagcaaattaaaggtgcaagcgcattacaaacggcactccaaaatttatccttacacttccttaatattcgttcctgtatgcaagatgcagaagttgccctaaaacacttggatgtcatgtggagtacaatgctagagcaaattaatctctccaaaaagtcgtttgctgaaattgataatgcatcgatgcttttaatgtttgaggaaacatttaaacaagctattagcccctggaaagaagttcaaggttctgctgaaaaattggttaaaatttttgatgaagcattggcggaatataaaaaacgttctaaataatttcttaaattaatttataaagtaaaaaaggaatattaaaaagtgtctgaaagcatcatctcacaaaaagaaatccagtatccaaaagttaatatcaaatccttggatgagactgtaaataaaatttggcttttggcaaaacaacaaacatctggtattacagctattgcagagaaagccgagcgagtcagctcctatagccgtgaactcagtgaattggtaagtgaatctttatcaaaattaccaccaatattaagtcaatttttagcaggagatattttccaatcaatccgtaaaattgataaagccctggaagcccatgatttgagtgatgagaagcgcagtgacatactaaaagcacgcgatcaatttattcagaaattatcaaaagatattgacaatgtgattgctaatttcgatgatagaatcaacaaactgactggaaaaattaatgatattaacgatatagtgattgcagggcattttgaagatgtgttggcaaaaacaaaaaaacaaaaggcagaattgcagagtgatattgaacagaaaaccaaagaaagaaaaaagttagatgccgaacgggataaaattatcgaaagtcaggatgttattcgcgcaaaaatattgcggatatgtttaaagattatctcccaaataccaatgacatcgatggcctgaatttcgctcaacctgaaaaagaaattattaaacaaagtattgagatagtaaaaaaagtattgggcaaaatttctgaaggattgaagtacatcgatttggaaaatgccagaatgaagctcactgaacaaattgatcataccatgcaagaatccaaggcactaaaaacgacattagaggaaacagagctgaggctttccggtttaaaagatgtgatgcaaatcgatacagaacgcaccactatgcttaacgaggtaggtaaactagaaaaagcatggcgtttattctccagtcaattacacgaattatcagataagaatattaatcaggactatctaaccaatctgataaacggacaattaaatttcttggataatttggtaatatcaatataatatgttgaaatagaaataaatatattggtaacgtcaacttcgtttaagaatagcgatatcagaatcccgtaaattcaagctcggttttttaggttggaatgtataagcgattaggcctgcagcgacttccaataaaaaaccgagctgactacggtgccttgaatgctcatctaagaaatatttttatgaaataaaatgaggaacatcatgatttcattgagagaaagggaagcttcgcgatgacatttgagtaatccattttcaattaaatgctaatcacttaaacccattcagtcacgcaaaaacgacatatcacgatctttatcgaattcaaatatccaaacactttactcttgaattgaatatgcctttcgaaaaaaactattattttttcaatataaagttgtttattcatgcttatattcttattattgaaattgatatcattacattgtcaatatacatattaaaagagtaaccaagtaaacaatttgctttttaacaattcactttttaatattaacgcaaaaacatcaccatttaataagaccttaacttaaatcacataaatataataattttcgatctaatatccctccaaataaatgatatcgataatatccaaataagagggcagatcatgaaagcattagtattagaaaaagcaggtcagatttcaattcaagactgggaaacccccgaaatattgggtgaaaatgatgttgaaataaaaattcactcggtggggatttgtggcagcgatgtgcattattatcaatacgggcgtattgggccatttattgtcgaaaagccgatgatcctcgggcacgaagcatcaggtgtcatcaccgcagtaggtaaaaatgtgactcacttaaaaatcggcgatcgtgtctgtatggaacctggcattcctaatctgcaatcaccacaatcacgggcaggtatttataacttagatccagaagtgcgtttctgggcgacgccccctattgatggttgcttacgtgaaagagttattcatccggcagcatttacgttcaaattaccggataatgtcagttttgccgaaggtgcaatggttgaaccattagctatcggtatgcaagccgccacaaaagcagaaattaaaccaggagatatcgcattagttattggtgctggcacgatcggaattgttaccgcacttgccgcattagccggtggttgttctgatgtcattatttgcgatgtgttcgatgaaaagctagaaattgcaaaacagtatccaggtcttcacccggttaatagcaaagtacttactgagaaagtgaatgcattaaccgagggtaatggcgtcaatattctctttgaatgtagtggcgcaaaaccggtcattgccactatttcagagcacattgcaccgggaggaatagctgttctagtcggtatgcctatcgatccggcaccatttgatgttgtctctgctcaagctaaagagatcacattcaaaactattttccgctacgcaaatatgtaccctcgtactattcgtttacttagctcaggtaagctcaaagtaacccctctattatccgcaacctataaatttaaagacagcgttcaggcgtatgaacgagccgcggagggtcgcccgacagatatcaaaattatgttggaaatggagtaacacatggcgctctatgctggtatcgattgcggtacacaaagtactaaagtcattattgtcgatagccaaaaaacgcctattttgggtgaaggcagctcgcctcacccaataattagcgattcaaacggccgtcgtgaacaacaggttcactggtggacagaggcattggaaagtgccttttctcaagcgattgagcaagcaggaatttctggtacagaaattgccgctcttgccgtatcaggtcaacagcacggttttgttcctctggatgcagaaggtcatgttttagcaccggtaaaactctggtgtgacactgaaactgcggccgaaaatcaggaaattattgatgcacttggtggtacccaagccactttagcacaactcggattaatgccgcagacaggttataccgcatctaaaattctttggttcaaaaaataccgccccgagttatgggaaaaactgaacgctgttttattacctcatgattatctcaattattggctaacaggcaggttagttgccgaatatggtgatgcttcaggaaccggattactgaatattcgtaaacgcgaatgggataaccaaattgcccaatttattgatccagatggtcgtctttggaatgcactgcctgaactggtttctgctgagacctgtattggcacagtaagacctgaaatagcaagaagattagggctttcaccgacaaccaaagttgcatctggtgggggcgataatatgatggctgcaattggaacgggtaatatcattccgggcatcacgaccatgagtttaggcacctccggtactctcttcacttactctgacaaaccgattgtcgctgattctgaaatgatcgcgggtttctgttcctctaataatggatggctaccattgatttgcacgatgaatgtgacttcagcgacaaccaccattcaaaagctgtttaatatggatattcagacttttaatgacacattgaaccagagcaaacccggtgctaatggtttgatgatgctaccgttttttaatggtgaacgtgttccaccactcccccatgccaaagcgagtctccataacctgaatactagcaatatgaatcaacaaaatttcattttggctgcggttgaaagtgccacgtacggactacgttttggcattgaattatttcgcaagcaagggattgaaattaatgagatccgtttgactggtggcggcgctcgcagcaaaaaatggcggcaaattgtggctgatgtcatgaatacgcctgttatttgtgtcactaaccaagaagctgccgcattaggtgcggctattcaagctatgtggtgtgattccttgacagaagagaaagataaacaaatgcagctcgcccacttttgccaacattttgttcatcttgatgaagagacccgcaccattccaactcccgaaacggccgcattatatgatgtgttttatcaagattatttatctctgctgactactgaatatccagaggtgaaaatatgacgacatatttttcatgatgaaaaaacaaacctcgctattttaaacgaggtttgttggttacctttattccaatttaccttatttagtcttgtattgcgcctcagcatcaacaaaacgctgttgcgctgcgctgctcggcgctttgcccaacagactcacaatcacgatcgcaatcgaagccaagataaagccaggaataatttcatacaacgcaaaccactggtatttcatccacaccaataccgtgacggcccctaccaacatccccactaatgcgccattacgtgtcatacgtttccagataacagaaatcagtacaaccgggccgaatgcagcaccaaatccagcccatgcattacttaccagagccagtactttattgtcgggattggttgctatcaccatcgcgatgaccgccaccagcagcaccatgaaacgccccacccataccaattctttctggctggcagatttacggataaagggtttataaagatcttccgtcaaagcacttgcacacaccagcaactgacagcttaaggtactcatcaccgcggccagaatagcagagagtaaaatgcccgctatccacggattaaacagaataaccgccaattccataaagatacgctcacggttggctatgactgggccagacagttcaggatgcatttcaaaataagcaataccgaagaaaccgacagcaatagtgcctgccaaacataacaccatccaggtcatactgatacgacgagccttgcggatagtgtaatgggaatcggccgccataaaacgcgccagaatatgtggctgaccaaaataacctaatccccaacctaacaacgagataatggcaataaagttcaactctttaaacatatccatataagccgggctttttgctgctatcagcgccagagaggtatcaatgccacccacagagaaaataacgataactggggtcaagataagtgcaaagatcattaatgaagcctgaaccgtatcagtccaactgaccgccaagaagccgccaaggaaagtataagcaatcgtcgctgcggcaccgagccacatagctttctgataactgataccaaacgtactttcaaataacaatcctccggcaaccacgccagaagcacaatagatagtaaagaagatcaaaataaccaacgcagaaataatacgtaggatcttgctactatcgtcaaaacgactggtgaaataatccggcaatgttaacgcattattattgatttcggtctggatacgtagcctgcctgcgaccaatttccagttcaggtaagcacctaaagcaagaccaatggctatccagctttctgaaatccccgcaaaatagactaccccaggtaagcccattaataaccagccactcatatccgaagcaccggcagacaaagccgttaccacgctacctaatcgccttcctcccaagatatagtcatcaaaatttttagttgaacgataagccaaaaaacctatcaacaacattccagtaatgtagacaataaaggtgattagcattggtgtatttactgtcatgcaagttctccatagtgttatctgtgttttgcaaatccgcagttctcccgggtacacagagttttccctgtcaggttcaggaacgttgcacctgattgcacctaaaaatggtccataattctaaattgaaataattatttttgtaaccaattagaaagttacagtgaatcctagattagcatcaggtaatttaacaactaattaacgccattttttacaaaaaacgtttactgaatcacatttatttgctttaaaaattatactttttaaccatttcagggttatacccttatgttagccacaaaatgttaaaccaatgtgtctcaatcaaataaagtcacaagaataaatatatccacctaattataataactagattaatttcacaaaaataaaacaagcgattctcataaggttgcacaaagttgcaacatgtcagatattatcatgcaattttagataaaccttacctattaaggagcaaagatgggtagtacaacaatgggcgtgaagcttgatgaagcaacgcgtgatcgcattaaagctgcggcacaacggattgaccgcactccacattggctaattaaacaagctatttttaattatcttgaacgtcttgaaaatgatgaacagatcgctgaactctcgtccaatcaagatgttaaagaggagaagataatcgcagaagaaacggtaacagattctgctcatcaacctttcctcgacttcgctgagcatatcctgcctcaatcagtaaaacgttccgcaattactgcggcctatcgcctgccagaaacacaagccattcccatgctgttacaacaggcacaattgccggaagatcaggcacaagcaactcataagctggcttacagcattgcagaaaaattacgtaaccagaaaaacagcatgggtcgttcaggtctggttcaagggttattgcaagaattctcgctttcatctcaggaaggcgttgcactaatgtgtcttgcggaagctttactccgtatccctgataaagccactcgcgacgcgctgatccgcgacaaaatcagtaacggcaattggcattcccatctgggccaaagttcatccatgtttgtcaatgcagcaacctgggggctgctgtttaccggcaaactggtttctacccataacgaagctaaactttccaattcactgaatcgcattatcagtaagagtggcgaaccattagtgcgtaaaggcgtagatatggcaatgcgcctgatgggtgaacagtttgtgaccggagaaaccatcgctcaagcgctggcaagtgcacgtaagctggaagaaaaagggttccgttactcctacgacatgctaggtgaagccgctttaactgaggaagatgctcagaattatatggtttcctaccaacaagcaattcatgctatcgggaaagcatccaacggccgcggcatttatgaagggcccggaatttccattaagctttctgccctgcacccgcgttatagccgtgctcaatatgaacgcgtcatgaatgagctatatccacgcctgctttccctgacattacaagcacgccaatatgatgttggtatcaatattgatgccgaagaagcagatcgtctggaaatttctctcgatctgttggaaaagctctgttttgaaccgcaactggctggctggaatggcattggtttcgttattcaagcttatcagaagcgctgcccctttgttatcgatacagttattgacttagcacagcgcagccgccgccgactgatggtgcgactggtaaaaggcgcttactgggatagcgaaattaaacgtgctcaaatcgacgggctggaaggttatcccgtttacacccgcaaagtttatactgacgtttcttatctggcttgtgcccgcaaactattgtcagtacctaatctgatttatcctcagtttgctacccataacgcccatactttagctgctgtttatcatatggcgggccaaaactattatcctggccaatatgaatttcagtgtttgcatggcatgggagaaccattgtatgaacaagtggtcgggaaaatcgctgatggtaaattaaaccgcccatgccgtatttatgcaccagtaggcactcacgaaacactgttggcttatctggtccgtcgtctgttggagaacggcgctaacacctcttttgtcaaccgtatcgccgataccacattaccactggatgaactggttgccgatccagtgacaaaggtcaagaagctggccgaaaccgacggccaaatcggtcttccacatcctaaaatccctctgcctcacaatttgtatggcaaagatcgcgcaaactcagccggtttggatcttgccaacgaacatcgcctggcttctctttccagtgcactattaagttctgctaccgaagagcagtatagcgagccgcgactgggcggcaattatcaccatcaaggtgagttaccggccgccaaaccagttattaacccggcaaccccttcggatattgtcggctatgttcgtgaagcaactgaacaggaagtcagtcatgcgttggatgtcgcaacagaagctggcgcaatctggtttgcaacaccaccatcagaacgggctgccattctggttcgtgcggcggaattgatggaaaaccagatgcagccgttattaggcattttggttcgggaagccggcaaaacctttaataatgcgattgctgaagtacgtgaagcggtcgatttcctccattattacgcgggacagattcgccatgatttcgctaacgatactcatcgcccactggggccggttgtctgtatcagcccgtggaatttcccattagccatttttaccgggcagatagcggctgcattggctgccggtaacagcgtattagcaaaacctgcggaacagaccccattaattgcggcaacagcggtcaaaatactgcatcaagcaggtattccccttgatgcattgcaattattacccggccaaggtgaaaccatcggtgctcttctggtgggtgatgagagagtgcgaggtgtgatgtttactggctccactcaagtggcgagtctattacaacgtaacattgccggacgacttgatgcacaagggcgaccaacccctctggttgccgaaaccggtggcctaaatgccatgattgtcgactcttccgcgctgacagaacaagttgttatggatgtggtcgcttctgcttttgacagtgcaggtcaacgttgttctgccttgcgtatcctttgcattcaagatgatgtggcagaacgcaccatgactatgttgaaaggtgccatgtctgaatgccggatgggtaatcctgaacgcctgtctaccgatatcggcccggtcattgatgcggaagccaaagccggcattgatcgccatattcaagcaatgcgtaccaaagggcgcacgatttatcaggcagcacaagataatgtggtcgacaatcaagagtgggatcaaggcactttcgttaaaccgacactgattgaactggaaagctttgatgaattgaaacaggagattttcggcccggttctgcatgttgtccgttttaaacgtcatgaactggataaattactggatcagattaataactctaactatggtttgacccttggtgtccatacccgtattgatgaaacaattgcacaagttaccgctaaagcgaaagtcggcaatctgtatgttaaccgcaacatggtaggcgctgttgttggcgtgcaaccattcggtggtgaaggcttgtccggtaccggaccaaaagccggcggcccactctatctgtatcgtctgctctcttgccgtcctcaaaatgcgatcaaccaaacgttggaacgtcaggatgcggaatatccactggatgctaatgttcgttcagcgctaatggctccctttgatgcgctgacagaatgggcagccaatcagcacaacgaagagctaaatcagttagttcaacaatataaattgctggcacaaggtggtaccacccgtctgttgccggggccgaccggcgaacgtaatacttacaccctattacctcgtggtcaggtgctgtgtctggcggataatcaacaagatacattgatccaactggcagcaacactgtctgtaggctgtcagttgctatggcaaaatgatgaattacatcagcaactgtttcgtcaattgccagatagcgtccgtaaatcaatccatttggttcaggactggcagagtgaagatacggcattcgaagcggttatttaccacggcgactctgatcaactgcgtcaagtttgcggacaagtcgctcaacgtaaaggcattatcatttccgtacaaggttttgcccgtggagaaactaatctgctgttagaacgtctgctacatgaacgttcactgagcattaacaccgcggcagcggggggtaatgccagcctgatgactatcggttaatttcggctgtagctaaggggaacacatcaaatgtgttccccaaaattaacatctctttgctgtttatatttccagcttagtgaccgccctgttgccagctcaaatactgttcatacttgcgcaaagcaatgttgtagttactgaatgctgactgtgacagcttttcactcagtttttcctgaattttctctgttgtgaactcttttacagggtaattgcttgaagtgagcaattcatccaaacgtcgtaaacgaaccacatactcacgaacagtactatgactcatttcagtctgttcaaacaggtactgtttgaaagacatgatgtcaaaataatctgtctcgctattgcaataaatctcactgcaaaaacgacataacgcgacaaatttatcttgcagctcatcccaagtcttgtcatcaatcaactccgtcatctcggagatggactctttgttgatcacttggccattaaaaaccaaagagatacggtcaagagctttgtgacaatgcaagcaatgagtttgactatgtttgtagtctttaatgtaacggctgagcggccgtttcttttgtgttgtaacagacataagagataagccctgtgtgtagtcttaaacaaaaaacaaataagcaaaaaagttacttttccggatttaagcgtgcccgcaagcgtttaatcgcctggctgtgtagctgacttatacgggactccccgacttcaagtactgcgccaatctctttcagattaagttcttcctgataatacagcgtcagaaccattttttctcgttcaggtaacgaatcgatagcttcaattacccgttgacgaacgtcactttccagcaattgttgtaagggattagtttcatgcccctcttcaatgacaggttcacagctttcaccatgcatttcatgccattcatcatacgaaaacaactgactgttattcgtatctaacagtatctgccgatattctaccagatcaatctttaattctttagcaacttcctgctcactggctggacggcctaagtcttgctcaagtttacggatgatgtgcgtcacttcgcgcgcattacggcgcacgctacgcggagcccaatcacggctccttaactcatccaacattgcacccctgatgcgttgtaccgcataagtggtaaacgcggttccttgtaaggaatcaaaacgttccaccgcatttagtaagccgattcccccggcctgaagtagatcatccagctccacacacgcgggtaacctaacttgtagccttaacgcttcatggcgaactaatggtacgtagcgcttccagaggctgtttttgtccatcacgccttcggcggtatacaaatcgctcacaacaacagacacctttggaaaaagagactaaccatcattatccaatcccctaacaagggcaatcgtttgaacaatgtagtaaaaacacttctttttcacctatgcgaaatttattgtctgcctaatagtatcacaaattttaggctgttcctgataaactcctaaaaaagaaggaccggcgagccgatccttgatttgtttggatttttatgtgaatcaggttcacatattgccctagctgagcgattaacgcagcagagacattacattctgaggcacttggttagcctgagccagaaccgcagtacccgcttgttgcagaatttgaccacggctcatgttagacacttcggtcgcgtagtcagcatcttcgatacggctacgagcagcgctcaagttgttaacggtgttgttcaggttgttaacggtagattccagacggttttggatagcacccaaagaactgcgcaggctgtcaacttgtgccagagcgctgtccaaagtttctagaggcttttctgatgctttagcagtgatgtctgcatctgctgttaatttaccctctttagtaatagtggcttcgaaatattttactttgccatctgtatcgtcagtacctttgacaacatatttaccaggattaactgaaccatcatccttaagagcttcatagacttctacacttttcaggcccttaactttagcgtcggcagtgtgatcgatatttttcttcccacctgcaccatcgtcaacctgtttaactacttctccgtgtggaacttccgcagaaatagtaaatttacccagattcagagcttctttgtcgatttttttcagatcgatgtcgataacttcgttatcattagcaccaacttgaatggtcattttgctatcttcacgcaaaacacgaacaccgttgaactgagtctgttcagaaatacgatcaatttcctttaaacgctgagtcacttcttcctggatagatttgatatcactttcagagttgctgccgttttgtgactgaacagtcagttcacgaatacgttgtaagttggtgttaatttcgttcagtgcaccttcggtagtctgtgcaatagagataccgtcattagcgttacgtgctgcctgagtcaaacctctaacatttgcagtgaaacggttagcgatcgcttgaccagccgcgtcatccttcgcgctgttgatacgcagaccagaagatagacgctcaatagcgctacccaaagtaccctgggatctattcaagttattctgagtcagcagggacaggctgttggtgttgatgacttgtgccatagttagagttcctttttaaaatcaagtcgatatataagtttgggttttacccacggtgttcatcaccgccaacagttttatcggcgctcctcaaagaacctttaatttttcttgaaaaaactttttcttttttatcacgctgcactgataagccaaacagcgtcggttcttcacgactattcctaccatagaaaaattatttttattagtaaacttttccaaaaacttaccgataaccggttcaataaagctttactaataaaggagtcaataaatggctagcatttcttcattaggcgccgggtcggggatggatctgggctctatattggataaacttcaggcagcagaacaaaaacgtttagtaccgctggcacagcaacaaaccagttataaaggtaagctaaccgcttttggtacattaaaaggcagtttagaaaaactggaaaccgcatctgaatcactgaaaaagttcgataaacttaacacaaccactgccagcgaaaaacatgatgcattcgttgccagtactgattctaaagccagcccaggtaactacagtattgaagttaaacaattggcacaggcacaatcattacagacagaaaaagtcagtaatatcaaagagtatctgggtgaatctttgggtgaaggtaaaacccggacaattaccattactcagcctggcgaaaaaaagccgatgaaaatcgagctgacagacggacaaacatcgattattgagatccgtgatgcgattaataaacaggaaggtaatgtcaacgccagtattattaaagccaaagatggcgaaaactatttagtgctgacggctaaaaaagcgggcactgaatcggtgatgaccatcaaggttgaaggtgataacaaacttagcgagttgctaaactatccaggtacaacgagtaaactcactcaaacggttgaagcgaaaaatgcgaaattgaccgtcaacaaaatcccaattgagcgtcagacaaaccatattaccgatgcacccgaaggcgttaaactggatctgaaaaaaacgaccgaggataaagataaaccaggggaacataagccagaaatactggttatatcccgtgatattgagccgatgaaagaggcgattaaaaattgggttgatgcttataatgaattacaaacgacatttgattcactgaccaaatttaagccagtaaaacagggtgaagaaccgtcgaaagataatggtgctttattaggtgacagcacattacgcggaatacagaaccagctaagaagccagattttcagctctcaggcggctaatgatattccaaccctgaataagctgggcattaaacaaaagcctgacggtaagctggaaattgataacgaaaaactggaaaaaaatctaaaagaaaagccgactaatgtgaaagcgttctttatgggtgacggtaaaaaaacgggttttgccactcagacacataagctattaaaagatgctctggatagccatgaaggtaccttagctaccgctactgatggtattaacaagcgtctaaaaacccttgatcaacaagtagacaggactaaacagaatattaacgaaacaattgaacgttataaacgccaattttcacaactggataaaatggtctcttccttgggaaacaccggtaacttcctatcacaattacagaaaataagataattaaaggaaattatgtatcaacgttcggcaagtcaattatatgcccagatagatgtggagagcgaaattatgaacgcctccccctatcagttgattcagattttgttcaacggggcgcttagcgccctacgtcgagcaattattctgatggaacaaggtaatatcgcggaaaaaggcgcagctatttccaaagcgatcaatatcatcgataatggcctcaaacaagggttagataatgaaaaaggtggagagctggcacacaatctcgcttccctttacgactatatgacccaacgtttactctacgctaatttacgcaatgatgagccagccattaccgaagtaataaagttactcaccgagatttcagatgcttggcggcaaattggccctcattacaacgccagtcaggatattgtttaatggataataaaatggatcttttgtcagcttaccaacggatcctaagtttaagtgagcaaatgcttaatttagctaaaaatgaaaaatgggatgaacttgttgatatggaaatcacctacctcaaagcagtagaagtgatcagccattcttcaatatcatcgacgacttctctttcgttacagcaaaaaatgaccaacattttgcaaataattttagataatgaaaatgagattaaaaaactactacagaaaagacttgatgaattaagtaaactcatcaaacaagcaagccaacagcaattattaaatgatagctacggccaattccctgttgaaccctatcataatacccttatgaactctacggagcaaaagtaattgagaaataaaggtgatgtactctcatcaccattatttacccgttttgtgagcttggtttaggatgtattgatttcaattcagattataaggagtcttggcaattaaatagtgttcggcttttcattctcaatatttcatacaccaatgaaaagtattttacatttctgactaaaatgatactaagcatctttaaaaccttgtaatatcccgctctactcaagcttgcccttcattttcatattccactcccatcattgatcaacgggtattaataagcttttatatgcagccctgtgatttcagttgattgtgaaaaacaaaaaggccacgccggagcgcaaccttgatgttttaatataatatgataattgaaggatatgttaatctaccaatttcaattattcatcaaagaaattcaattcaatttctagtgtcttaccgactgattcaacaaataacgcttctaattctgatgagtcatcagttttagtatacaaaagagtcaataaatattttgtttcagctacccctaaatcatattctttacctaagcattttacaattaatctttttgaaccaaattgttccttgattttactggaattatcttctacatgaataacaaaacaatttggaggagtgctagctgtatgagctacatcgaattctataatattttttaggagcaatgtattattactgatttcttcccattttcccatgctatatccaagtgaataattaagtttattagcgtaaccaaaatattcggttttcatactagaggctttaccaacagttaaccttgctttcagttgatacgcaggttcaatatgcggcttaggtttaactggtttttctcccacaaattcccaatcacaagccatcatatcttcttgcgttggctgccacggtacaaaattgccatgctcattacgcagatcaatatgcgtcaaataatcatatttagtgccaacggcgacaccatcaacaacgtaagcactgccttcttccactgttaaatcattcacacgaggggtaatagccaaatacatctttttatcgcgccaaacagaacgagcgacaagcttacgtagctttaattgaatcagggcccaagaaaaagaaccaaccggagcgacaacactatgacattcatattgcttaggatcaaactggcattcattttcaagcttaataacctcagacatattatttccttatatctataaataattaaaaattaaaccacatgatttaactttcaatttattattaaacattcagtaaatttttatgaattaatgcaaccggcataaaacttaagattcaattataacaggatataccgctcattctccttatcgttttttgatacttatcaataaattagcattaacctcagaaattagagttgaaaattattattcgaaaccgtgacaccttaaatattttattgactatgagttttacaatatttaattaaatcgctaactacaacaaacattcaaccaaaacatacggtaaagttgtaaattcagttaaccacaataaacacggctaaaaaaccagatgatatgaacgctccgagttgaaaacttcatccgctaaaaggggctgattgtaacaaaatgggcagtactgaaatgtggacagaaatgcaatctcagtatgaagctatggattgcctctcaacacaaaagaccagaaataaaaccgatggaatatcctgtttgcagcgccgcggaatttatccacgacactcgcgatctctcttattaacgatagacatcaataaattaacatacctacacctgcatattcataatctcctgataagaagccgttagcttattttttgcctgaacgcctatttgcaaagcaatactggatttctgcatctccaccattacatcattcaattcaacaccgggtacacccagtgtaaaatcctgagctcgttttgtggcattcaaacgtgtttgattaattttacccacagccgccatcagttgactggcaaatccactctgcaacggtagtggttttgcgatactggctgcctgtaatgcctgagcttgcatcagttgcagcacgctttcaattgcctgaattgacataaaaacctcgtgttaaaccaccctataacctacgccattcaatgccatattaacccaaagtaatatacggcatatttttagactgccaccctaacatagccctctcgatctaaagcgggtaattaaagtaaaaagtcagggcttattgtgccattaaaagatgagtgaacagcgaataatgacaaaactgaaaataggaagaattttttcgcttgcgtatggggagtctgttttgttacgccacgcttttagtattcatgttgaacagcaaggcaaggatcgtctatgagtgccgcaacaaccgacgttgaaaatcaaactaaaggtttcagtgctatcattaaccagataaaagctgatcctaaagtgccattattagttgccggcagcgcagccgttgcgattgtcattgcccttttcctgtggttacgcagccccgattatcgggtgctttacagtaatctgagcgataaagatggtggcgatattgtcacccaattaacccaattaaatatcccttaccgttttgccgaaaatggcgctgcgatcatgatccctgccgagcaggtgcatgagacacggctaagattggcacaacaagggttgcccaaaggtggggctgcgggattcgaactactcgataaagaaaagtttggcatcagccaatttagtgagcaggttaactaccaaagagcattggaaggtgaactgtcacgcaccattgaatctttagggccagtgcaaaatgctcgtgttcatctggcacttcccaaaccctcgctgtttgtccgtgaacagaaatcgccctcagcttccgttacggttggattactgcaaggtcgtaccttggatgaaggccagataaacgccatcgtccatatggtttccagcagtgtcgctggcttaccaccgggcaatgtcaccatcgttgatcagaccggacgtctattgacacaagccgatgcgaccggacgcgatctcaataccagtcaactgaaatacattcaggaagtggaaaatcgcttccagcatcgtatcgaaacgattctaaccccggttgtcggtcgtggtaacgttcacgcacaggtgacagcgcaggtggatttttcacgccgtgaagagacggcagaagaatataaacctaaccaacccccgaatcaggctgcggttcgctcaaaacagttgagtgaaagtgagcagagtggcggccctcaggttggcggtattcccggtgcgctttccaatcaaccgagctcaccaccgagtgcgccgattgataaaccaaacaccaaagagaacaataaaaacgacaagagcgataagaaagcatcatccgccggtaacagtaatgagcgcacggttaacagtaatcgcaataaccgccgtgatgaaaccacaaactatgaagtggaccggactattcgccatgtgcaacaacaagccggtggtgttgaacgcttatccgtcgccgttgtcgtcaattatgtcacggtagaaggcaaaaatggcccggaaactcaggccctaacccctgagcaattgacaaaaatagaagcgctgaccagagaagcgatgggcttttctaaagagcgtggcgacagcttgaatgtggttaatacaccatttactgaaagcaaagaaaatatcgaggttattcctgtctggcagaacccggttctgttagaaaaagccttcgattttggccgctacctgctattgattctggtggcatggctgctgtggcgcaaaatggtggtgcctcaacttgccaaaaaacgcgccgcagaaaaagccgccctcgacgcacagaaagttcagaaaagacaagtgactgaatcgagtgcggaaatggatgaaaaaacgcgccagaaactgacacgtcaacgagtcagtgctgaaattcaaagccaacgcattcgtgagctggcagaaaaagatcctcgcgtagtggcgctggtgatccgtcaatggatgagtaacgaacaatgagcctgaacggaacagaaaaaagcgccgtcatgttaatgaccctgggagaagatcaagcggccgaggtgtttaaacacctgaactccagggaagtccagcaactcagtatcacaatggcaggtatgcgccaaatttctaaccagcaactggtggatgtcttggcagagtttgaagaagatgccggccagtatgcggcactgagtatcaatgccagtgactatttgcgttcggtgttaattaaagcgctaggagaagaacgcgcttccagtctgcttgaggatattctcgaatcccgtgaaaccaccaccggtattgagaccctcaactttatggaacctcaaatggcagccgatatgatccgtgaagagcatccacagattatcgccaccattctggttcatttaaatcgcggacaagcagccgatatccttgcgctgtttgatgacaaattacgcaacgacatcatgctacgtatcgcgactttcgggggtgtacagccggcggcactggctgaactgacagaagtactcaataacctgttagacggccaaaatctcaaacgtagcaaaatgggtggcgttcgtactgcggctgaaattatcaacctgatgaaaagtcagcaggaagagaatgttatcgaagccatgcgtgcctacgataacgaactggcgcaaaaaatcatcgatgaaatgttcctgttcgaaaaccttatcgatgtggatgaccgcagtatccagcgtctgttgcaggaaatcaccactgactccctgctcattgcactgaaaggctgcaaccagcaactacgcgatcatttcctcaacaatatgtctcaacgtgccgcagagattatgcgcgatgacctggcaaaccgtggtccggtgcggatgtcgcaagtggagaacgaacagaaagcgattctgcttattgttcgccgtctggcagaaagcggtgagattatcctaaatggtggcgacgatagctatgtctgataagttaaaccatgctgactggcaaccctggaaaccaaacgagctcacacagtgggaaaaactacgggccaaacccgagcccgttgatgactcacaggaagagtcagagcgtaatgaaatccttgaacaagcggcaatgctggataatctgaaagaacaggcacggcagacaggccatgaacagggatttaccgagggtcaagcgcaaggttatgaacaaggttaccaagctggcttagaggctggtctggaacaggggcgaaaagaggctattcagcagcagcaacctatcaccgagcagtggcaaaatctgctggccgatttccagcattcactcgaagggcttgacacgatcattgcctcccgcttgatgcaactgtcactgaccgctgcaaaacagatcttaggtcagcctgcgatttgtgatggcactgccctgctcaatcagatccgtgaatttattcaacaggagccgatgttgagtggtaaaccccaattgcgggttcatccacgagatatgccaatggttgaacaacaattaggcaatacgctctcactacacggctggcgcttactggcagataacaaactgcatcctggtggttgcaaaatcagtgcagatgaaggcgatttagatgctagtttggccacccgctggcatgagttgtgccggctggccgcaccgggggaattgtaatgaccgcaagactcgggcgctggctggcgacactggatacttttgagcagaaactagcgaaaacctcaccagtgcgtcgttatggacgtctgaccagagcgaccgggctggtgatggaggcaacgggtttacatctgcctctgggggcaacctgcctgattgaacgacaaaatggcagcaatattgaagaagttgaaagtgaagttgtcggttttaatggcgaaaaacttctccttatgccacttgaagatctggaagggattgtacccggtgcccgggtatacgcccgcccgtacagtgaagattgtggcggtgggcgccagttaccgcttggcccggaactgttaggacgagttttggatggtgccggtcgtccactggatggttttccttcgccagataccagctatcgtgccccactcaccacgccgccaatcaatcctctgcaacgtacaccaatcagcgacgtactggatgtcggtgtgcgagcgattaatgccctactgaccgtaggccgtgggcagcgtatggggttgtttgccggttccggggtcggtaagagtgttctgcttggcatgatggcacgttacacacaggctgatgtgattgtcgttggcttgatcggtgaacgtggccgcgaagttaaagatttcattgaaaatatccttggtgccgctggtttagcccgctcagtggttgtcgccgcacccgccgatatctcaccgctgttgcgcatgcaaggtgcctcctacgccacccgtatcgctgaagattttcgtgaccgaggtaaacatgtattgctgattatggattcattgacccgttacagcatggcgcaacgtgaaattgccctggcaattggcgaacctccggcaaccaaaggctacccgccttcggttttcgccaaacttccggcgctcgtagagcgtgcaggcaatggggtgaatggcggtggctcgattaccgcgttctacaccgtactcaccgaaggtgatgatcagcaagacccgatagccgatgccgcgcgggcaattctggatggtcatatcgtcctctcccgttcgctggcagaatcagggcattacccggcgattgatattgaagcgtctatcagccgcgcaatgaccgcactcattgataaacagcactaccggcgggtacaacagttcaaacaacgactcgcaagctatcagcgtaaccgtgatctgattaatgtcggtgcttatgctgcgggcagtgatccgctactagacaaagccattgagctttatccctacatggcacaatttctacagcaagatattgaagaacgtagtgaatatgacgctgcctgcattcaattacaacagttgttacctacataacgtaacgattttctgggtgttgccattaaagcgaggaataagatgcagcaacaatcacctctcataaccttgcgtgaccttgcacaaaatgcagtggaaaaagccgctactcacctggcacaagtttgtcagaactatcagcaaatggagcaacaactcgcaacgttgatgggctatcaagatgaataccgggagcgcctgaatgacacactgagtcatggtatgccatgtaccacttggcaaaattatcagcaattcatgaaaacgctggaaaaagcgattgaacagcacaaattgcagctcaatcaatggcaacagcggcttgatacggctttatcacagtggcgggaaaaacaacagcgcctcaatgccttcgatactttgcaacaacgggcagataacaaccgaagattacatcagaacagaacggaacagaaacagatggatgaatatgcccaacgtagcgtacaacggagaaataaataatgaatctcactcttttgcctgccgacctgaaaccgacagaaaatcaaccaacgcgcagcaattcactcactgatgccgatcaaccttcggcttttgctcagtttcttaatctggaaaccgaactggcacagaaaggcggggtcaaaccaggaaaagtatcatccaaagaagaagaggttacagatgatacagaccacgatttgtcgccactattatccgtcccaaacgaattatccgccccaaacgaactgtctatcgcaaatgaattatctacctcaaataaaataccaacagagcctattacctcctcgctgattcctcttgatgtcaaagcagatacaaataaacaaccggttgctgttgatgagaaacttatgtcagcagaagagctggcggcaagtttacccatacaattatccggtttagccatcaaaccagaaaaccagaaaaccagcctccaacctgacggactcgttaagcataatgataaaaaccgtcaaattagcgttaaagaattagtcgttatagaattatcgactgaagagaatcctctgacagcgattgcaaaacaaccaaaacaggaagaagaaaaagcagacgccttttttaaaaccaaacctgaaaacggacttgggcaaaattcttcggtaaaacccaagattgctgccgcagctatccaacatgaaactgcaactccgactcatccacgtgaatcagcactcactcaaactaccgctcaagctgagatccagcccgcgccagcagccactgaaaatcaacaaaccgggcaaatctcctctgtggcaacctctcccctgctttccgccggacacaatcagacagcccagtttcagttatccagtgcctctacccccttactgaatgcccaattgggtagtgaagagtggcaacaacaattaaatcaacaaatcattttatttaaccgcaatggcctgcaacaggcagagctacgcctgcatccacaagagctaggcgcattgcaaatccgcatgtctgttgaagataatcaagcgcaattgcatctggcatcggctcacagccatgtccgggcggcactggaagcggcattacctggacttcgccatgcactggcagaaagtggtattcaactgacccaaagcagtgtcagcagtgacaacgcgagtccgtggcaacaagaacaacgtgctggttcacaacattcagacggaaccgcaagtcgcaatgctgatgccacctcagaaaatcactcagccactgaatccacagtacatttaacacctcatcaactcgcgtccgcccggggaggtgtggatattttcgcctgatagtagcaagtaacttcataacaaacgaacgagttagtcgttttttccccgtttgttccagctattgcctgcggaaatacgcgggataatgattatcgatattgatggataagtcagcccaccatggaatgcgtggacacttatccgcaacaaaaacaggaatttgtctgtccatgtctgactatagctacgagcataaacgcaaaaatccatttgggatgatactgttagtactgattgccgttatcggtaccgccatcgggggatacagttggtgggcacttaaacaggcaaaagagagtgactctgcggcatctaaagccatagcagtccctgtctttatgactctggagccttttaccgtcaacctgatcgacaatgaagatcactttgaccgagtgctttacattggtgtgactttacgtttagccgatgaaaaaactcgccagcgcttccacgaatatctgccggaagttcgtagtcgtatgttgttgctattatcacgccaaaaatcggccgatctggctcatgacagcggtaaattgcgtctgatggacgacatcaagcaaacacttcgcccaaccttggtacccggtgaaccggatcaggtcatcaccgatgtgctgtttaccacgtttattctgcgataatcaccatgagtgacaatattctttcacaggcagagattgatgctctgctcaatggcgacagtgccagtgacgacgtagaaaatacctcgtccggggaaaatgagattcgcccttatgatcccaatacccaacgccgggttattcgggaacgtctgcaagcactggaaattattaacgaacgctttgcccgtcatttcaggatggggttgtttaacatgctccgccgtagtcctgacattaccgtcggcgcaataaaaatccagccttatcatgaattcgcccgcaatctggcagtaccgaccaaccttaatctggttcatctgaaaccgttgagagggacagcactgtttgcattcgcacccagtctggtttacatcgcggtagataacctgtttggtggagatggacgtttcccgaccaaagtagagggccgagaattcacccataccgagcaacgagtgattaaccggatgttacgtatggcactggattcctatcgtgatgcctggagcgccattttcaaaattgaagtggaatacattcgctctgaaatgcaggtgaaattcaccaacattacaacatcaccgaacgatattgtggtgacaacgccatttcaagtggaaattggtgcgttgagtggtgaatttaatatctgtattccgtttgccatgatcgaaccactacgggaacgtctgaccaatccaccattggaaaatgcccggcaagaagacagcctgtggcgagagagtctggtaaaacaagttcagcattcagagctggaattggtcgctaactttgctgatatcccgctgaggctgtcaaaaatcctgcaacttcagccgggcgatatcttacctattgataaacccgaacgcctgatcgttcacgtcgatggtgtgcccgtgctcaccagccagtacggaacattaaatgggcaatatgccctgcgagtcgaacatcttattaacccagttttaaatgctctggatgaggaacagcccaatgagtgatgctaagcaacccacagataccgctgcaaccggatctgccgaagatatgtgggcagaagctctggaacaacaggccgcgcaacaacaaacctctgacagtagcgcggcaatttttgaatctctggagcctcaggatgcactggctcacttatcggatatcgacctgattttggatattccggtcaaattatccgtagaattgggccggacaaaaatgaccatcaaacagctactgagattatctcaaggttcagttgtttcccttgatggccttgccggggagccgttggatattttaatcaatggatatctgattgctcagggtgaagttgtggttgtatccgataaatacggtatccgtatcaccgatatcatcaccccttctgaacgtatgcgtcgcctgagtcgttaatatggctttccagccctcgctgcataatggcgcggcagaacctgccgcgcaaacccaaacggcgactcaagtcgccacatccgcaccacttcccgcaggtcagacactgatgcaggtcagcagtgcactggcgggggtgttgctattaattttcaccctcacttggttaatacgccgtatggggctgttttccagcaaagggaagactcagcaacaattaagtatcaaagccagttgctctctgggacaacgtgaacgtgtcgtcattgtagaagttgaagataactggctggtactgggtgtcactgctcagcaaatcaatttattacatcagatgccaatacctgaatccaaccgtgataacaccgaaggacaagctataaaaccggcgctgtttggtcagattttaaaaaatacgctgatgcgacaaggcaaggatgatgaaaaaaagtagttctctctttatgacaagggataagtttgcattgtcatgccgcctggggatgatactcgctgcgcttattttaccgatggatgccgcggcacagttgccgggcatcatcagtcaaccgctggcaaacggtggacaaagctggtcactaccggttcaaacgttagttttcattaccgcgctgacctttattcccgccgccttactcatgatgaccagttttacccgcatcattatcgtgttgggtttactgcgtaatgctttaggcaccccatcggcaccacctaatcaggttctacttggactggcgctatttatgacatttttcattatgtcaccggttttcgataaagtttatcaagatgcttatctgccttttagtgaagataaaatcagtctggaaaccgctttagaaaatggtgccaagccattacggcaatttatgttgcgtcagacaagggaaaacgatttagcgctgtttgctcgtcttgctgatcagccgccgtttgaaaccgccgattccgttcctatgcgagtactgatgccagcatttattaccagcgaactaaaaaccgcttttcagattggttttaccctgtttattccatttttgattattgacctggtggtcgccagcgtattgatggcgttggggatgatgatggtcccccctgctaccatctcactgcccttcaaactcatgctatttgttctggttgacggctggcaattactactgggttctctggcacaaagtttttacggttgacctgaaaagaggcaaacattatgactcctgaatcagtcatggcattgggaacagaagccatgaaagtcgcgctggcgctggctgcgccgttgctgttagcggctttattatgtggtttaatcgtgagcttgttgcaagcggcaacacaggttaacgaaatgacactatcatttattcccaaaattctggcggtatttgtcactaccgttatcgccggaccttggatgctaaacctatttctggactacatgcgtgaactctacagcagcatccctgtgataattggctaattatgatctcttttaacagtgaaatgctgatccagttcgtcagtgaatttttctggccgctggttcgggtgcttgcgctgttcagtactgcgccattattcagtgaaaaacaggcacctaagaaagtcaaaattggactggccgtgatggtaacactgctcttgatgccaaacctgcaacctgcgcaagtgcctattttctctgttaccgcattctgggtgatgctccagcaaatcctgattggggcatcacttggcctgacaatgcaaattgcctttgcagcagtacgttatgccggtgaagtgattggtttacaaatggggctctcattcgctaccttttttgatccctccggcggcccgaatatgcctattttggcgcgaatctttaacctcttgaccttactgttatttttggcctttgacggtcacctatggctattatcggttctggcagacacattccagattctaccgatacaaccactgcaactcagtgctcaaggatttttactgctagcacaaagcgccagtatgatatttatcaacggcatgatgctggctctgccattaataacactattattaacactgaatttatcattagggattttaaaccggatgacaccacaactttccatctttgtggtcggttttccgttaacactgactaccggtatattggtactcacgcttttaatcccgatgttagcgccatttaccgagcgtatgtttagtgaattgtttaatcgactggcggtcattatcagtggaatggttatttaaagatattatttaaaacaaagtttacctagaaaaaatccgtattttatatgatataaattgtactatttatgctataaaatcttatcgataagtaaaagaaacacaggttttaattagccatactctatggatttcaagatgcctctttgttagctgcactcactcacccccgatcacatcgttatctatgctcccggggattcgctcccttgccgtcgcgatccatcttgaaatctgtagggtatatgttacacaacaaagtcaatattggtaccagcgcccatgtttttatgcacggtacctgttatttttcatactcttaatatggcaatcagagtgtattgataaaatcgtattaattgaacaaaattatcgatgtccgcccattgatgactttttatgtaaaacagaatcccgctctggtcatttaagtgatatctttttacgctgaacacatgtttcaacagaccatttaaccaagtcaatcgtcgatcctctatccattcgaaggcatgaagcaaccgtaattgcctgagagcaagcaattacaaagcggtcccctgaacttagatttctttcaacagcgttgaatcgttcaatataatcactgaaccgagaaaagatttcgtcctgtgggttctcaatttttggcggattaacttcctttttacaaaccaagattgcatcaagattgataggatcttttgctgcacttttagggctggcaacagacatttcagcttttaccgggtgagcagctacaatgtcaaaaccagctttagtgacagaatcgtatattgccatccagccgtctattgtcgaatgatgataactgaaacacaagagaccatcttctttaagcactcggttgcattccttaaaaatactgcaaattttccttgtgaaactttcgttatccctatcttgaacttcattttcatgtgatgaatcttttctatttaagtattcatattcgccactaagagcattagaaagccaggcatagaaaaagtcactcaattcactatagtgaacaaaatcaaaatacggtggatcagtaattaccgcatcaaccgatgaattagggatgggaagtgaagaactgtccgcattcaaaatcaaagcaccttgagaagcgtttttgaacgtttcccatgattgagtaggatttacccttatcggatcactgcaaacgactttttttgaaaaacattttgccccattgttttcaatgaatacttcaaatggttcgtcaagataggtcttcgccttaatcaaacgactttcaaataatgtcgaaaatgtaccgctgcttttccccggtgttccccatatactattttctaatggtgttctctctggtttcaaaatatggttcgaaaacatatgacgaacagcaccagtaccttctcccttaaaactgcaaaacaggttattaaattcaagtgttccactgaacaggcaaacaaaatgatcccgaatcaccttgtctttaattttcaatatccgttgaagcaataatccaagacataacaattgacgttcattaaagaagtcacaccaattattgtaattatatccacgtgcttggttcgtgttatatccagctctaactttcatagtaggtaatggaagatcgcctttgatcagggaaaagcgttcacgcgtttcattaaaaaggtcgtagtcatattgggtcggtttgatatagaccttttcacctgcttcgttaagcgccataatggcatataatttatgcttgggtggacactctttgctagataccaattccttgattttgtattcattacctctactgtcaataatttttgttcccctggcaggtccattttgggggttaaagttatgtgagcagcaagggcatttaatgtcagtactattgtatttccccacaataatagattcgcatgacggacaccatatttgcgaatccggtttcttgctagcgtagacatttttactgaatacataacttgaaaacaacggaatttcttcaccctctggcgtggcgacaaccttcacccaaaaatagtaaagtgccggcgtggatttcgacgcatcgggaaccattgttgtatagtaggaaaggatttcctcttttacatcccgttcaatggatttaaattcttttttcagttcatttatattcacgctagccattgcttgtgtgactaagaatgtactaactgggttaacatcacatcctataatacttgctccaagcttcgccgcttcccccaatgtggttcccgaacccataaaaggatcaagcacaacctttccggtatatttttggtattcgtaaaaatccttccattggccttcagtaagagcaccggaaacaatagaacggaatacgcttcctaaacgcttcgcccaccatttatgaatatggtagataggacggttaatttcctttctgtaactttcgatttccgcaattggatcaatctgctcgaaaggaaaatcattttcaattatatacttcatattattttgttaacactggcatagagacagacgtacgtatttttgctatacgtgctttgcagtcagcaaaaatatcttcaatcagaacaggttcaacagattaatcaggctttccattatcaatgatattgtacaaaaaattgttttcgtaaatgtcgtaccttgatacttcttctgtagccaaatgcgatatctgaaggttttcacaatcaaattttttcgctacaaaaacttttcttgtatgaaaacacttcaatttgtagtttagtggattagggtacgtatacattgcccgatgacgaacagaaccttcaccgtacggaccgtggttatacttggtttggttcgcaactttggctttcttataaagattaaaatcatagttgatgaaatcaccgtgcatcaaaatgaaagttacaatactgctattgtcattgctcaataatgcgtacatgtaataacaaggaatctcgaccattgcattgcccatctttatcaaagcagttccgcacggcaagcaactattgtaatccatagtaagaccacgtgaatcagcgccattcggcttctgaattaactttttaacttcaagcccaacaatgatacccgttcgcttgtcacgaataataatatcaggggtagtcagcttacctgaacgaacaacttccaattcaggaaatgcttgttggagtttttgttcaatcaagcaatcaaagggatcgtcttgaactgtaccaaccaaagaaggcacacgcaggtcaacaggtataacaccattatcattaatctgaccataaaagttatcgtaaacggctttcattatttgatgttcattatggtacatgcacaatccttaagattattttctaatattggttattgttttcaaccacttccatgcaatagtaaccagaaacgctgcccgctttaggcgttataccgtaacaatttttaaaagcaagatcaaaagggaaatcaaataacacgggaaccaggaccaaacttggcaaacatggttaattatgaagcaattcgccgaacttctgcaatagcaactctttatcctgcatatgtcccggctcatagatattataccctatggatttcgagatacatcgcgacggcaaggaagcgaatccccaggagcatagcgaactatgtaatcagtgtgagagagtgcagccaacaaagaggcagcttgaaagataacgggtatatcattttaccgtccttctggcagtattctacccatttaagtactacactgtacttactttgtaacacattacgatggaatcattagctatgagcgaaactacttttacctttagggttgatgatgccctgaaaaatgactttaccgcagcagcgaaatcactcgatcgcaaaggcgcacagctactacgtgacttcatgcgcgatttcgtgcgtcagcaacaagaagcgagcgtccatgatgcttggctccgcaggcaaatagaaataggccaagcttctgccgatgccggcaatctagtgccagccgaccaagttgaagctaaatttttagcccgccgcaaagccacacttcgccgttttgaggccaagtaatgcaattattttggacgccagaagccattcaagaccgtgaggaaatatataccttatggatttcaagatgcatcgcgacggcaagggagcgaatccccgggagcatagcaaactatataaccggggtgagtgagtgcagtcaacaaagaggcaacttgaaagatgacgggtataaacaacaatcttttatttaaggggtaaacccttttaatttaattaggaataaaatcaatataaaaaaacaaatagaaactaatcttcatttctataatcacatttaaaacagagaaagaattttattaaaaaataaattccaatcatcataaaatttatatctgatttcatcataaaaaattgaactctactggacgcaaccttatttttcctcttaaaatataagactttcccttgacgacataagaataaacacttatattttgagtatccaaagcggatatgctcttttaaaatagggaaagaaatggttaaagtcatttggtctaaagctgcaatcaaacagctaacgaggatcgatactcgatatcagaagacgataaaacaaaaggtgagttcgctaacagattttcctcttgttgctctggatatcagaaaattatcaggattcgataacagatataggctcagagttggcgattatcgggttttgtttgaattactggatggagaacctaatatcctggaaattcaggaaattaggcgacgccagacaaaaacctattaacaaataggtgaattttccatttaaccatttacctctaagggctacgtaactacgtaaacatacggagcaaaagaatatggctagtattcaatttattacagacgagcatggcaaaaaacaagccgttattttgccaatggacgagtacgaaagactgttggcagctgcggatcatgatgaaaattatcaaattattccctatacaacgggaccaaatgacgatgaaactattcctcatgaagtcgtttctatcatggtagacgatgaagtttcactacaagccgcttggcgcatttatcgtggactatcacaagctgaggtagcggaaaaactgggtataaaacaagctgccgtttctcagtttgagaaatcagatcgcccacgcaaagcaacgattgaaaaattagcggatttatatgattgccgaataagtcaactagtgctcgactgattaaagttagtaaaaagttaccaatacgaccagggtgagatctcaccctgctgttttcccaccaatgaaatttctgccggtataccacccgtttcatcaaccactcaaatatcccctatcggttcaatctggttataatgaaaaacccatttcccgacttttaacactaattttgtgaatataagggtccggggttttacaatcacaaacggcacttttcatgttaatcgaaagcatgttttttccttaaccaatattaacactaccaccaccaatcacaattccgccacaactcaccgcgtcaccggttctcgccgcaggtttaccatcaacaaaaacggtactggaaccaccggcaattattcgtgaatgagatgaatgtggcgctaaactatcgccctgacgagctaaaggaataccgtcaactttcacgctggtcgatcccgaaataaccggtgtcgcgccacaatcatcatgcgctgtaccaatatcaccaatctttaccgcattacccatattgcttcctccatatctggcagaattaacataattagtctttatcttgcgtaaccgataatagctttcttttactgttcccatccagaaaaaatatcgggtcaaataacccgatattgctacccattaaattacctgaacaaaacggccattaattaatgagaaaatcggcgcagtagtactgaaataagtatcgccatcttcattattaacagtgtaataggatattggagaatattctaaaattgatttattcactaatttgaccattctacccttattcattattttaacgatatagtcatcccaattaatcggtatcattttgaaacttttttctttgatatcactgttaataggttgatcggcaaaaacactttcttcactttcatcagtggcccaagcccaggctctaagcgcaattttttgttgttccctaagagtatttatatctttggcattataagcctgccagaccgccatataagcctgttgcaattgccgacgttgctctggggtatcggtataaagggttgccttcacccattcccaatcaggtaaaccactgatttttacactgcggctaaatcggtacaaggtcatattaggaggaaattctttcggattaaaatactttttctctacatgcccatcttctacattttgagcctgtaccacatggcgtaccaccggtgtgctaatagcagcatatttagcttcattcgcgggtgttgttgccacaggctgaccgtttttatcaattgccacttcaattgccgtcaatacttcactttttttaccacgcatagccgtcagttccagcgtgcatttagcctcagggttaaagtgattgcggtctttatctgataacgcatctgaggaaaaccaacccaacgcaccaaactccaggctaacttcattttcaccatttgccaagaataacatagaggccgtactggcagtaccaaatccccgtccttcttgagccgaatcacggttatccattcccgttacgccattggttttaatatcacaaaaggcatattggatatcgaataaactgcgaatatacaacctcggttcatttgcctgagcacttaacataaaaatcactcctgataacagcaataacagtttcaatctcattttatcctcacattccgggtaatccggtgataaacgggatgttatccatcttaggcttaaagttagggtcataacccatttcccacgatgctgtttcagcacctgggactatctccggtcgattaataggccgctcttctcctatcagattaattcttaacggggattcactggcttttaacggatcggcaataacccatttccacttctttttaacttcgattatagaatttctactactatttctccttgcatcaacagctacctgaatctcagcaacaatcccattatggtagccagccagatcgatccctttatcatgttgatcaagttcaaaacccgccgctgtttttacagccacacccgctcccattgcgacttccattatcataatatgagtcttaaaggcgacattcacttttccttccagactcaatttcaaatcattcttattaccggcgtcaaaagtccactgcttttgtttataagcggcacccaactgaaaggacagattgcatgtcaaaataaggcaacattccagatctaaatagtttttatcatttgaattcctgcgggccagcgcctccctgaatttggctaccaccttctttatcttgcaatacgccgcccccatttggataagatccagttttgccgtcatccccataaaaggtgcggcactgaaacccaaaaaatgggtacggtcatccatcgaagtggttcggccataagcataagccagtccaatattgatgggatctaccttgagctcaagcagttggtagctgcgggtgccttttgaatccggatcgggcgccaggtattccttggtataacccagtagcttttccacccgattgatagcctctaaattgggcagggttttcctcacctgattaacttccgcaaacttcgccgagtaatccatatcctgaaccgttaaagcgtattcgacgttaatggccgtctgtcgggtcagataaaatgggtccgtatgggttgtccatccactgcgcagtttattgccatttttaggcttgacattttccatcgcctgacgcgcttttttctgttcatcacgccgctcctttacagaacgttctccgtgggaaaaatcaaagctcaatccaaccgaaaccataaaactgaccgacgggtaaaccgctatcgtcgcgtactgtcgactatccaggcaaccctgggttattaacttataataacgcggctcactgtacatatctgtcgggttggcaagattagataaataaaaccagacactatccaggtcactttcaatctcagcgtctttcagttgatctttataaaataatgtcacctcctgtggcgcattaaattctagcgttttctctttctgtccccccgttagcaccgcatgatgtttaaccgtgttattacatttaccttcaatctgtatcgtccctttttgaccttttccatgatcaatcaggctcatcttaattgccggcttttcaggccatacctgagtattctgaccaaaagtgacgctgattttataaatacaggggtccgggttgtcgcatgtcatgcaagcaacaccggcacgggatgaaatagtttgttcagccatatcaattaccttttaattacctaatcggggataaaacccaattcgctttttaataatgtttccatccgataataacccggccactgggggtctctaagtgcggttaaccatgccagcgggatttgctcaaactgattgatatgtctcgccatcagcaaatagagaaacccgccaatggcgcgttcatccgtgatttcattatcccgacaaaaataaaaacaatcctctgctagggttttatgttgaataaatgtggcctcatccatataggcgggagaataatgtgtatcagggaacgggtttttcaatatccggtctgaatgtgccgacagggagtcgtatggcagatctatggtaccagcgctattatagtaattgacttcattaataaatcgcgtcagtttattaatatatcgttgttcgaatagctcatttaactgagcatattgctttgttgtgatccgcaacatcttttgtctggagccagcctctacgggaaattgttttctgaccgcgtgaaaattatcttcatgcttaacgcccatcagagaagtgctaattttatttatcggccccagaaaacagtgaatttcccagtcactgaggacactgagaaactcccagatattgcgcggatcgtaaaaccggaaaaataccggtttatcttgatcgggtaataatacttgaagatatttacgtaaatgctgacgcaatgttttcatatccgcttttgagtgaagacaaattccccaacatgtttgccattcctccaaataaagtccgactttttctgtcacctccaccaagtaaggcgctaccttaagccgttcaggtggtaaagattcatcataaagacaaaccgcggggggattaaaattttccaagataaaaaacaatcggtattcaatcgcaccgtcaatgacggcataatatttttcagcggccatcagtcgttatcctccttcggacaatgtgcaacaaacaaggagccggcactggcggcagcttgcaaaatgaccggatccgccggtcgcaataaatctccgggactcccccctgagttcagattgatagatggacctttgatatcgacaccatcagcatgaataacgataaaactattacctactttcagactgattttattgccgctttgcaccgtaatatcaccattggtatcaatactgagcataccttgaactttctgtgctacattgccatcgacctgcaaagttttgtcaccctcaatctgaacaacgtagttcccggtagttttgtgttcctgttgcccatcaaccgttattttacggttattggcaatgaccagttcgtcatcatgaccaatgctggttgtacggttataattaattcgctcatcccaggaattcagtaccttaatcgccaaattcttctgagcatgaataaatatctcttcccgatctttttcatcttcaaatcttagttcattaaaaccgtcccctttatgggtttttgaacgaattgacatctgggtttttgctatcggcaaagggttaggcacaacattactggcatgataggtacgcccaataataattggctgatctggatcgccatgcagaaaatccaccagcacttcctgccccacacgcgggattgcaatcatgccccagcgcttgccagcccaagcctgactgactctgatccaacaggaactctggtcattgaatttgccatattgatcccaggcaaactgcacccgcacacgcccgtattcatcacagaagatctcttccccctccgggccaaccactgtcgcaatttgcaagccgtcaatgcgcggtttgggataaggcgagggacgccacacccggttgcgatcgccaaaggtgaagctgttcgttaaggtcgtccccatttcaccgaaacgggattcatccgcctgcggctgtctaccgtgatgactgattttaatgaccagccacagggtattaaattgctctttcggatgatcagtaagcgtaaaccctgatgccggcgccagagcaaaacagtcactttgtgcacggccaaacatagcgtcagtgcggagtgcttccagacgatattgactcaggcgctcgccacgctcatctttaaagcgcccgggaaaatcatagtaagtgtaactgggtaaatctgaacgctggtgattaatttggcgttcgtgatagtaacagtcagccccccacagcggatttttaaaagtacgatccttcaacacaatgttggcaatcccgacctgttcacgccagcagaatcgattgatgctgcattggcttcctgtagcatccaattctgggtgatagggcaatgaaaatttgttatttatccgatgagaatcaatgaaaataattatcggttcaccccgctcctcagtgaaatcgaaataataaaacatcccttcatcagccaataaacgatggagaaacgccagatcactctcatcatattgcacacaaaattcccgttcaggatgttcataacgcaattggcaatagaagtttctaacgccattttctttcaataatatgtcaataatctcagccacagattgatgctgaaaaatacgggaattaacccgtaatcccgcacgccataaagcaggttgaatggtcaaggcataataactgcgatgacgacctgtcgtactttgttcaaattgagtcacaatcccagttatactgcgctcgggttttccatcacgataaacggtcagtgtcgcaaaattatcaagaacatcagcgaaattaatatctggatcagcactggttaatgtcgcctccagacaaaataacgttgatagtgcttcatctagagtaaactccactacagcaaacgttttctccgggagatgacccgcagtcagtgtaaaaaccagtcctgaatccgccattacattcctcctgactgagtgaggtcgaagctccaggaattaaatagatcatgtaaaacaaccataatttcaccctcttttacttagagcctatcccaataggcgtaattgttgcaggccattcttatcaatgaacagtgaacacggacagcgcggaaaaaccggaacgtacacgtagtacgtgaggattttgagcactgcccaggttcgctctttatggcaaagaagggcaaataaaatagccctattgggataggccgttaaatgattaccgaaaatattcactagcaaattcattaaccaaacttttctctgttcaacatatgaacgggagggtagaagagggaagaaataatcaacttatttttttaaaataacaacattttattctaataaataggaggggttttggcagaaaatttcaatatattgaataggttacgttaaaatgaattataatgattttattaactaaaatcgctggtctgaatcagtaataaaaatattgataagaataaattcactaaaaacggagaacagaaaacaggattatttaattgagaaaatcgctggcctgagaaccagcgattaatataaataaggaaaaccgaattaacgaaatatctcaaacaacgacatgcctttcatatcagcaaatgtcttatatgatgcttgaagtacggcttgttgttgataataattcgaaatcgctgagttccattctacgtcaaccagttgacttaaccggcttttattcgccaggctgcgttccgcccccaaattatctaagtcttccatttctctcagttgtaaacccaataccgattccaccgaagagatattattcaatgcgttgcgagcgccgcggttagccttattcaacaattccagcgcatcatcacgactcttttgatctgcttcgacgaatggtgttttcaatgactgaatcgccatatctatggttttaaatatatcagattcactctggttgccatccggctcttttatcggattactggtagacgagagaaagacttgcttcccggtatgtccaataatcatagagcggttgctatccactttctgagttatttcctcagagcctcctagatagctgactgtgccggttgtactctcatcaaaaggtttcatatccgttttataaccggcaaaaatatagcggccattaccatcagtggtattacccaaattcaccagttgttctttaaaccctgtcagttgaatagccagcgagttacgatcttcgtcactcaatacaccgtttactgtggctaccaaactttcatgaatatcttgaaccacaccgacagctttggatactacactcaattgcatggaaatcgcgtttttagcaaacgagcgggccgttatatattgctggttctgagcttcagcttgagcgaccatgacaccctgagatgccgccatcggatcatcggatggatttatcacccgctgaccactggatagctgtgctccctgctgcatccatttcgactgagcagtagtgatactcgtcattttctggtcgtacaatatattggtacttacgcgcacaatttcattccttttaaatattcagcgaaatgcctaagatgtctcaggctattttttattaaatggcacgtttattagcgacggagttccaaaatggcattaaataacgttgtgacagtctggataacttgcgcattcgccagataatattgctgtaagttttgtaatgcgccatattcttcatctacgttgacgccggaaaccgactgctggtcagcgtaaagttgtttagtaatattattctgagtttctaaatcaacattcgcctcgctggtctggttaccaatggtactgaccatcgaagcataagcaccagaaaatgatgcgttaccctctaccaattttttgttctgcaattcaatgagttttttggcattgacgttatcactcgccccaccatctttattaccggcagccgccaatttcgacgcatctttaatattaaccgccatattgccaataacaccgctgacggttttcagtgtatatcgatcgttttcttttacattggttggatcaatttcaacttttagtccatcaaattccagtgtattacctgtcactttggcggcaatatccaccttaaccttaccagaagcatgctgaattttccaattagcgccatcgtagctaatatgataatcactatcttttaccaccgaggtatctgtatattccactttaaaattagcagaacctttatttttactattggcaatcacatccgggttattaaatgtgaagaaatcttcacccggtttgccttttaaatcaaaaccagcacgatgaacctgattaaattgatcgcccaataccaacgctaatcggtttaactgattacgggaattatccagtacttcactacgcgcccgtaatgtaccgcctaattgccctttatcaatgaatttttcatcaatttcaacaacatcaccaaaaccacgatcataacctaatgtaatgcgactgctatccgcattggatgaaatcgcttctactcggtaagcggttgttccctgaaccagtgtcaatccccccgcaaaagagacattgtaagaatcgccatcctgctgaatcacactcacgccaaccagcttattcagttcattgactaattgatcacgctgatccagtaatgcattcggctcagcactgccaccgcctctcatacgggtaatttcaccattgagtttagcaagttgctgcgcatagttattaatagactcagccgaattagcgattccccgattaatgttattttccattttacgcaggaaagcatccgcactttgcaactggtttaccagcccctttgatttaccaatcgctgttgttctggctgcatcatcttccgcattactgacaacattttgtaaactggtaaagaagtcatcaatggtgtttgacaggttattcgctttatctgccagcaaattatcaatctgggaaatttgctgagaataagtggtgaattcaccttgtttcgcccgagcctcagacagttgttgattaatgaattcattatattgacggttaatactggtgacagtaacaccattgccgataaagccaacggatgtcatcgtgccgccgttttgattgacaactgtcgattgccggttataaccaggaactttggaatttgcgaggttattactcacggttcccagagcaatttgagcagcttgcaggccactcatcgcgatattaataagactgctggacatcagaagatccttttacgttttatttatgtctccgctggtggcggcaaataatctttcagctagaaacaaagtctgaactgctttaatttatcggctgaactcaataaaacttgagcaaaataaagatcagaatagtttactcaaatcgtaggtataggcttttaccgcctgctctccggcaccttttagctgttgaatcactgagaccagttttttcgcatatccgggatcggtcgcataacctgcctgttgtaaggaataagccccttgctccgcggtagcagagcgggcaacgttggcgtaacggggactctctgtcagtaatttgacgtaatcctcaatcgcttccacgtaagagccataaacacggaagttatccttcattttctgtggctcaccgttgatatattctgtggtcaagatattggttaccggccctttccaacctttacccgctttaataccaaacagattatggcttggcttaccatcagcggtcagaatctctctttgcccccaaccagactctaatgcggcctgagcaataatcagcaaatgaggaataccactgcgttggctagctatccgggcaggggtcgagagcgtagagacaaaattcgtactgttcagggggagcggtttaggtgccacctcgggtttcggtaccgttcgacggataaattgctcaagcgcctgccttggcaaagtttgcaaaacgtcgttatccagcgtcatggggaccttacccgccatttcgccaggggcaattttgttgttagcaagctgcttgagcatcatatcggcaaaacctagccccttctgagcaatattctgcgcgatttgctgatcgtatatcgaagtatagagtcgtgtctgttcactgctcaacatgccctctttaggcagagctgaacgcatgcttttcaacatcatctgaacaaagagcccttccatttgttgggctacttgccgtagcccctgttgtggatcttttgccagattggattttaacgcgttaaccgactgtacatcataagccgcaccgggcagggttaaaaaatcattcatcaaatgatctccaatttcgcccgcaaacaacccgcactttccattgcctgtaagattgacattaaatcattcggtgtcgcacccagagcattcaatgcttgaataacctggctcaaacttgcactggcgttaacctgttgcaacgcaccattttgttcacggacagcaacagcgggattacgagtaacaacggtactaccacctgctaacggtgtatttggctgactaacaaccacttgattatcgacaatgacagaaagattcccttgagcaacagcgcagctatctagcatgacattgcgattcatcacgacagagccggtgcgagagttgacgatcactttggcatcaccgacatcaacacggacagtgagattctgcacatgggagaggaatttaacctgcgcacttttatctctcggcatacgcaattgtactgtgcgggcatccaacggcgttgctgttcccgttccatccgtacgattgatcgtatcgctaatttgctgcgccagtgagaagtcttcgttatttaattgaagattcagtacgccattttcaccaaactgggtaggcaattcgcgttcaatcactgcaccgttactaatccgaccacctgcaagttgattgacttttacactgcttccccccgcgctggcaccggcaccaccaaccaatatattaccctgcgccagagcatagacctgattatcaacaccttttagtggtgtcatcaacaaagtaccaccacgtaagcttttcgcgttccccaatgaggaaaccaccacatcaatattctgcccggcacggccaaacggcggtaacttcgcggtgaccatcacggcagccacgtttttcaactgcatattggttcccggaggaacagtaatccccaattgggataacatgttgcttaaactttgggtggtaaatggcgtctgagtcgtctggtcacccgttccatccagcccaactactaatccataaccaatcaacgcattttcccgtactccttgaaccgtggtgagatcacggatacgttctgctgatgccgtcgttgtcaccagagtcagcaatacaagaagaaggctgacagcaaattgttttatcataaccatcccctgttaaaatggtgcaacattcaggaagaaacgctgtaaccaccccatgttctgcgcttcattgatatagccattccccacatattcaatgcgagcatcagcgacctgattggaactgaccgtgttattagcattaattgtccgtgggttaacgacaccggaaaaacgaataaactcggttccctgattgatagctatctgcttttcaccaaccacatgcaagttaccgtttgccagtaaccgatcgactgtcacggtaatcgtccctttgaaggtgttattcgcattagcgccgcctttcccaccaaacgtgttctcggcttccatgtccagatcggttttatctccaccaattagccctttcaggaaacggggagtcagtgctgcggaaaacgtgtttttcccattacggctggcattagccgaagagttcttactggcgctgacattttcctgcaatgtaatcgtcagggtatcgccaatatttcgtggtcggcgatcttcaaatagcggctgataaccataataaaccggctgtactacttgaaaaatagcaccattagggactggtgcagttgccacagaaggtgcggcggtggttgctccctcaaccaggggtttttgcggtatatacgcacagcccgttagtgacaataccgccagtgctatactacaacgccatttattcgccatatttttccgtaaatggcggaactgacaaacggcgctggtctcggcaacagccattgtatccatcttcgatactcttaatttatccctgaataacggggaaactgaatgttcccccgcggttctgattgacgattaggttataactgagtcagtttttgtagcatctgatcagacgtcgacaccgctttactattaacttcataagcacgctgagtctgaatcatattgaccaattcttccgcgatattgacgttagatgtttcgacatatttatgctggagcaatcctgcgccattgattcccggtgtattttcaatcggtacgccagagctgctagtctctacataaaggttttcaccgatactttctaacccactgtcattgataaaagttgtcagagtaaattgaccaacttgctgaggtaccgattgcccctgtactttcacactgacaataccatcactgctaatggtgaggtccgtcgcattatcaggaatggtaatagtagggaagatcaaaaaaccgttagcggttgtcaactgtccgttttgatcttcctgaaatgaaccgtcacgggtataagcactggtaccatcaggtaactgaacctgaaagaaaccctttcctctaatggcaacattatggctgttattagtttcagataagtttccctgactatgtatacgttctgttgctaccgggcgtaccccagtacctatctgtaaaccagaaggtaagcgagtttgctccgatgacatcgcccctggttgacgaatgttctggtaaagcagatcttcaaaaatggcacgctggcgtttaaaaccattggtgctgacgtttgccaagttgttggcaatcacatccatattggtttgctgggcatccagcccagttttagcaatccataatgatcggatcatcggttttatcctctgtgtctaaatcaactcattgctaatagctgattagcacgttgtgcattttcatctgagctatggatgactttcatctgcatttcaaaacggcgggcattggcaatcatgctcaccatgctttccattgggttgacgttacttccttcaagcacaccgggcattaatttcacctcatcactggctggcaagacatcaccctgtaacccttgcgcctgttccgtcatgtgaaaaaggccatcatcgccgcggactagctgatcgctctccggtttcaccattttcaatctgccaagttgccccaactgtgttggcggatcaccaggaatcagtgcagatatagaaccatccgtcgccagggttaactcagcctgtggcggaatattgatcgggccgttgtcccccatcaacaagttaccttgaacagttaactggccttccgctgaaatctgaatgctgccgttacgcgtgtaagcctcagacccatcttcaagctgaaccgccagatatcccccctgcccaatcgccacatccaacggacgagaggtatagttcatcggcccctgacgattgtcagaacccggcgttgaagccacaaccaaagtacgggtattaaaggcagccccttcaacaggcaccgctcgcaaagcagccagttgcgccttaaaacccggcgtcgaggcattagccaggttatttgccgtcactgcctgatgttctagtgtctgacgagcaccgcccattgcggtataaatgacatgatccataatgctatcctgaaactatcagcgcatgctgaccagcgtttgtaggatctgatcttgggttttaatggtttgcgcactggattggtagttgcgctgcgccacgatcatattaaccagctcctggctcatatcgacgttggatgcttccagcgaaccactgagcaatttgccaaaaccgccagaatccgcaatgccaaccactgggttacctgaagcgctcgtctctacccaaacgttatcacccttcgctgccagtccttctgggttagcaaagttagtcagaacgatctgacctaataattgggattgctcattggtataggtgccgatgacacggccatcttgctcaatacggtagcccttgaattcacctgcggcataaccgtcttgcttgggtgctgatatgctgtcagtatcaatcttttgctgtttactgccattaaaatcaatagtgatatcagcggcattagaaccattcagagaaggaacattaaatgtaaactgattattgtcaccaattagtttaccgttgccatcaaatttcaacgtccccaacgaagcggctttagcgccctcaaccgcactatcctgagcatgaacctgccattcgttatcattcgttttcacaaagaaaacctggatagcatgtgggttacccaagctatcaaaggtggtaacactggtaggatagttataagaatcgttattttccggcgagaaagcctctgtcggttttttatgcatcgaattaaggttggctgtcatcgtaaccttagttgttgctttagccatcaatataccttgaggtattgtaattggctctgggttagcccctttctgaatctccggcgcgccaccattgacgctggcagcgggatagccggtcaatttcatgccttgcatgttgataatattgcggttctcatccatcttgaattggccgttacgggaataataaatcccgccatcaccgccttgcatacggaaaaaaccgccctgcgtgatcgccagatcaagtgttcggttagtcgtcgttggcgtaccatctttaaaattctgattaacacccgatacttttacccccagtcccacctgagaaccggcaaaaatgtcagaaaaagcaaccgtgctggatttaaaaccatatgtcgccgcgttagcgatattattaccaataacatccaaattacctgccgcggcattcaaaccacttactgcttgtgaaaaagccatattattctccgttaaaattcttgctggttaaagaatttgacgtatctgatccatagtgacggcaccgatccgccctaaatctagcttagcgccgtccgcgtcacgagtaacaccatttaccttcgcaaacctcagcggctgaaatactctctgttcgcctttatagctggcagtaatagtgaagttataagcgccatcctcaacattcgtgccatcttcttttttgccatcccaagggcggaagctatggacacccgcttccaatccaccgagatcaatttggcgtacaaccccgccttgtttatcaataatggtgacttgcacactatccgcgggcctttccaactcaataccatatggtgtcgtactgacgttcccagcttctttgtctaaacctgccaaaatagtattcccagggatcataacgcctcgcccaatcagagctgatgcctgtacaggctgattattatttatctgaccgacaatagaccccagtgtggtattcagcttttcgatccccgctagtgtgttaatctgcgccaaatgggaagtcagctcattgttcttcatcgggttagtggggtcttgatttttcatttgcgcgaccagcaatttcatgaagttgctattgagctcttcactaccctttttcttgccagccaatactggctctccaacaatcgtgttattcagtgattcattcactgaaccggtaatcgccatgagtcactcctgttactgacctaacgtcaatgttttcaacatcatcgacttagttgtattaagcacttcaacgttggcttgataactacgggaagcggaaatggtgttaatcatttctccgaccacatcaacgtttggcatccgcacataacccttttcatcagccaatggatgtcccggctgatactcaaggcggaaaggggtgggatcatcaacaatttcactgactctgacgccaccggtttcctgccctgccggtgcggcaacacggaaaaccacctgttagcccgatacggctgaccatcaggtcccgcaacactatcggcatttgccatattgctggcgctgacatttaatcgttgggattgagctgataatgccgagccggcaatatcaaaaatactgagtaaagacattgcccttatccttgctgtaagactgccatcatgcttttaacttgagagctggtcgccgtcagttcagcctgatatttcaagctgttatccataaaattgctgcgttccatatccatatccaccgtgttgccatccattgctggctgataaggcacccgatacagtaagtccatctccattctcttctgaggctgaataggaatatgccgatcggatgtcagcgtcagcccgatcccgtttccggtgacccgaccgtgtgcaatggtttttttcagttgtgtggcgaaatcaatatcccgcgcttgataaccgggcgtatccgcattggcgatattagcggacaatatttcttgtcgccgtgatcgcaatgacagagcttcctgctgaaaatgaaaggctgcatctaatttatcgagcatattcctccctctgatgtgactgacctgtgttgtgaaacttaatagcgctgttcgcgatcgcgaaattcgcagtaaacagaataaacgcagaaggaaaagcctatcggatgaatagacgctaattgaattgctatttatcccattggccgatattcaatgtaggtacacttatacgcgactaattacgcgactaatatatgcgactaaacggcagcatattgacctacagaaataatgagagcgagaagatgcaagctataaatattatcgggctgttcgcatttttctttatcacttcgatggcatggggcaataatttaccccaagctatggagcactatttccagcagatacatagggataatcattacaaagtttctgttaacatcagaacccctgaacaacaatggcctcagtgtgaacggccagaaattcaacccgctatcggtggtcaaaattggggaaatctctctttacctgttatctgccatcaacaacgcaaattcattcaagtcgctgtcagtgtgacagggaattatctggttacccgccgagctatctcgcgtaatgatgttttatcagataaagattttcaggtcagaagaggattactggaaagactaccgcatgatctggtcattaacaaaaatgagataaaaaatagtattgcgatacgtaacatcccggcggggcaggcgattacgcataatatgttacgccgcccgtgggttgtacggtcaggccagagtgtggcggtgattatacagggaaatggctttcagatacgaaacgaagggaaagctattaataacgccgctatttctgataaagtcagagttcgaataaattcagggcatgttataaccggccaggcattagaaaacggcaatgtaaaaatcatgttataagttctaaagttttctttcactgtgccgatataaccagcagagcacgatttgcaggtatgcaaatggcatgtaacctgctccgatccataggtgaacctatgcctggccataaaggataatgattatgagtatcgaacgcactcaccccttattagctatcgctgctgttcaacagcgaccaactaatgaaagcgcccagggcacccgaaaaaccgccggcgttaccttacaaagcagcgatgcacaagtaaaactgagcgaagcacaaacaaaactggttcaaccaagcagccaggatatcaatatccaaaaggtgcaaaagttgaaagaagctattgctcagggaagcttaaaaatgaacagcggtaaaatagcagacgctctgctcaaagaagccgccgaaaactttcaatacgataagaaataattaaacccgctatggaagaacttcaacaattactcgaacagcaagtgacctatttgacctcgctgacccaaactgtggcggaagaacagcgtattttgtgcgagggttttattgaagcacgagatttgcaccagataacagaacgaaaaattttcctgttgtccgcgcttagccattcagaacagcaacgtcttaatttgagcaaagcattaaacattactgcgccttatgataaacaacctttgctggccacattatggcaacagatcggcaaagcagttatccgggttcgtgatttaaacactcataacggttcgttgttaacccagcatcttgatttgaatagtaaagccattgctttcctaaaaagccatcatagcccctcgctttacggttcagacggccaggctgcccgtcacagcatgctttccggccacaaagttcaggtttgattcagtgcattaccgcccattgcggtagtgctactttttattgttttgatagtatctgtaagcccaccttcctgttcaacccgagcttcgtcgctgctcacggagtcctcaagcatgaataattcaaacgaaacgaaatgtactgtgaaacagttgttgcaatcggggaagaacggattagcaaaaatcaccatttgtaagtcaacataacaattgcacaactataatgttttgcgtgttacgaaaatatattgcaaaataggaataagcaacaatgggtaactatcaaaattaacagcgagaacattcttcatttcattaatctaccttgggaataatacattgatgcataagcaactaaaaaaaagaaaatcgagcggacaacaggtaccaaaaacgcctcagcaacaattcaaaacttactggaagtccatcgaaaaataccaattgaagatcgccaagctacaacagcaacaagacgaattgttcatgcgctttcaacaggagatcttaccggtagaacatcaatatatgcagtccagatatgataaagcggcacggttgctttcatttgccgataaaaaatcgctggggaaaaaccaacggagagaattattttcctggatagaagaagagcttgctgagttatatacttacccctttaacgaaaaccttgatctcaataagttgaccgatcacttttccaatcttaatgcgttgaaagaagaggaaattccgacaccagaacagatggatgatatccgacagacttttagtgaatattttgattttagtgaagaaatatctgatgaagaattacttgatatgataaaaaatcccgaaaaaatgcgttccaccatagaacagcgttttcaacgggaatcagagcatttccacgatgaatatgatgcagaagagacctctgacttcgatcctgcggcagaagaccagaaaaaactggattctttgtttaaatcgcaggaagtgagccaaatgtatagaaaaatagccaaggtactgcatccggatcgtgaacaagatttggatgagaagaagaagaaaaaccagttgatggtacagttatcaaaagccaagaaagataatgatgtctggacgataatagacatgtaccacaagtacattgatccaactttcagttttaatagccgggatatatccaacatcaataaattgctcaaagcacgtatagacatattagccaatgagcttaatcagctaaaaaaatctgattcgttaccgggcatgatttggcgcacactgggaggtaatacatcgaagacaatagagaataacctccgcgaacattgcaaaaaattgcggcaaaatatagaaaacgaaatccaactgcgcgaaaacctacgctcactcaccgtactaaaaagctaccttgcagaacgacgtgatacctttgaatttgaacaagaaatgattgactattttttcaaacaatattgaatccgctgagtctgatggaaattccagtggcttaccggccattaactgcgcactgtgtcagtacattaccatccattgtggtagtcccatttccttgtaatatatacaaaaaatggggctgtcctagattagaccatcatttgacattttcaaaaacataaactgcaccggcttcggactcagaaccaagcttgattggacctgcgccaacaaccaaactcgtccccgccttattcaggccgacagacccaccaaaaccacttaaattgtctgaagggttcaaaatctccataggtgtttccatattccacttattatttaagcaggtatacacatataccctggaatacgcccccactaccaagcaatctcctgcatcattcagttcgagaacgcggccaaaatacgttacgtcacttgcaggagccgaaaacttaatgggattttctttatcccagatcccattcgtgcgcttatacaaataaacccacccatctgtggatttataaaattccatacccaccgctaggcgatctccctctgcattcaggctaaaagccctgcccattaataggttattttcagaggcactaaacttaatggggttttctccatcccagatcccattcatgcgtgtatacacataaatcgtgtaaccgttatcacgcaccgccaaacaatttcccgtagcacttaagtgggcaatccaaccaaactcataagaatccgaaggggccggaaacagaatgggtttttttgtatcccagatcccattcatgcgtgtaaacatacggaacggagagtagtctttgcccccagccaccagacagtctcctgcggcgttcaagctgacatttacaccaaagtattcaactccaatcggaaacactacggggtgttttgtatcccagacgcccttcgtgcacgtatacacacaaacccgcccttggttataagtgggatacggcaacatgtttcccaacgccaaggtatctcccgccgcatccagacagacatcccatgaagatctatgatattcatcttcaaaagcctcaaacacaattggcttacgtatattccactcaccactcttccggcgcgtatacacacagacttgattattcatcccaaccgctaagcagtctcccgctgcgttcagactaacagagctaccaaaatactcattctctttggggaagggagaaacaattcgcgttatcatggtacgtttcaaacccaacacctgcgtaatctccatccgctcccgccgcgacaaactgaaaaaatccgcaaactgaacctgccgatcggcatccaatttcaaataccctcccccatcaaaagagagcccaccttctggcttcagtgataaggccaaagcgccttgattagaattcaacccgccagaatgctgggtgttgagggtcagttttcctttgccatctcgtttcagtcctgtggttaggttatcaccctgagcgccatcaataatttcatatgccttatatgcctcatcaatcaaatgggaaaaggcttcaggcatgagccgtacaccagacttaaaactcgctttcaatgagtcaacagaactaatttctttatcagtcatcatatgtcctcaaaagccgtattaggccgtcactgccatcggtttctgttaatgttttatccacttcgttaaagtcgatggaattaagtgacggcactgactacgaaatacaccacaattaatgccttcacaccttttagctcgatatcctgcggtttggcgatacttaacttcactgactacctcaggtatgttgctatcttctaaaaacacatccccgataacactgatttgatatttaagttgaatatgtcattaacttttcgtataacacaatctgatattattaagcattatggaaatgtaaatttttgccagttatttaataaaaaattaattgttcctataaaatttcacataaaaatataccgcttaaataataactcaagaaatataattaccgcaacaaccataaagttaattagattaaaatcaatccaccaaaaaacaaaaaaattaaaaaattaaaaaattaaaaaattaaaaaattaaaaaattaaaaaataacataataaaacatctttatttaaatataatctttttactatcattcaataaatgtatttcattttaatttttaaagaaaaattagcacatattcaaacaatatcaaaatcataattacccatgttaaataattcacaatcgtaaataaaatcaatataaagacaagaataatggttaataaataaatttaaaactcctcataaacacaattaccacaaaattaaaaataatataaaatcacctaaaatgataacaccacatccttttacaatatgttcctgttatgtttaattgatttttattagatattatcatgcacttactttccatgtttgaaggtaaaaaaacaaaataattgttagatacccatattctgttctatgccgccaataactctacaaaaactaaataagagaacagttgaattaattaatcatgatgctaacacacttttttaacgaaaaacgccgtaaaccttcatctaatgcggacgggaatataaggcggaaagtccaaggactttaaaaagcaatccgacatcacctaattaacatccagtttaatgattatagtcatcatttgacattctcaaaaacataaactacaccggctttggatttagaatcaacactctctgacgttgcaccaacaaccaaactcgtccctgccttattcaggccaacagacccaccaaaaccatttaaattgcctgaaggattcaaaatctccatcggtgtttccatattccacttatcattcagacaggtatacacatataccctggaatacgcccccactaccaagcgatctcccgcatcattcagttcgagagagctaccaaaatatacgctatttgccggggccgaaaacttaatgggattttctgtatcccagaccccattccggcgcttatacaaataaacctccccatctgtggagttataaaactctatccccaccgctaagcgatctccttctgcattcaggctaaaagccctacccacgaataggttattttcagggaccttgaacttaatggggttttctccatcccagatcccatttgtgcgtgtatacacataaatcacgggagcataatcacgcaccgccagacagtttcccgcagcacttagatgggcaatccagccaaactcataagaatccgaagggatcggaatcggaatgggtttttttgtatcccagatcccattccggcgcataaatatacggaacggagggtagggtttgcccccacccaccagacagtctcccgcagcgctcaagctgacattcacaccaaagtattcaggtcctatcggaaacacaacgggatgttttgtatcccaaaagcccttcgtacgcgtatacacacaaacccgcccttggttataagtgggatacggcgacatgtttcccaacgccagggtatcgccagccgcatccagactgacatcccatgaagatttataatattcatcttcataagcctcaaacacaataggtttgcttatattccactcaccactcttccggcgcgtatacacacagacttgattatttatcccaactgctaaacagtctcccgctgcgttcaggctaacagaagcgccaaaacgctcatcttctttagggaaggtagaaacaatgcgcgttatcatggtgcgtttcaaacccaacacctgcgtgatctccatccgctcacaccgcgataagctgaaaaaatccgcaagctgaacctgccgatcggcatccaatttcagatatcctcccccatcaaacgagagtcccccttctggtttcagtgataacgccaaagcacattgattaaaatttaacccgccagaatgctgggtgttgagggtcagttttcctttgtcatctcgtttcagtcctgcggttgggccatcaccctgaacgccatcaatgatttcatatgctttataggcttcatcaatcaaatgggaaaaggcttccggcatgagccgcacaccagacttaaaactcgctttcaatgagtcaacggtattaatttctttatcagtcatcacatttcctcaaaagccagccgtattagacagtcaccgtcatctgttttctgtatgggcatcaattgatattctcaaagatataaactgcaccagctttggatttagaatcaacaccttctgatgctgcgccaacagccaaactcgtccccgccttattcaggccgacaggcccaccaaaaccatttaaattgtctgaattgcctgaagggttcaaaatctccatcggtgtttccatattccacttaccattcagacaggtatacacatacacccgggaagctgcacccactgccagacgatctcccgcgtcattcagttcgagagaaccgccaaaagatatgcgacttacaggggccgaaaacttaacgggattttctctatcccagatcccattcgtgcacgtatacagataaacctccccattatagggtttataaaaatccgtacccaccgccaagcgatctccctctgcattcaggctaaaaaccccgctaaaactagatgatccaccttcagggcgacggaacttaatggggttttctatatcccaaatcccatttgtgcgtgtatacacataaatcgcggaaatgtaatcatcacacaccgccagacggtttcccgcagcactcaggtgggcaatcgcgccaaactcataagcatccgaaggggccggaaacagaatggggttttttgtatcccagatcccattcctgcgtataaacatacggaatggagaggagtatttgcccccagccaccagacagtctcctgcggcgttcaagctgacattcgcaccaaatcttacagcatccctcggaaacacaacgggatgttttgtatcccaaacgcccttcgtgcgtgtatatacacgaaccacttcgggccatatgtctcccaacgccagacaatctcccgccgcatccagaccgacacgccatgaagataaatcatattcaacatcctcaaacataatcggcttgcttatattccactcaccactcttccggcgcgtatacacatagacgtgactattcatcccaaccgctaaacagtctcctgccgcgttcaggctaacagagctaccaaaatactcatccgttctagggaagggagaaacaatgcgcgttatcatagtacgtttcaaacccaacaactgcgtgatctccatccgcgctccccgcgataaactgaaaaaatccgcaaactgaatctgccgagcggcatccaatttcagatatcctcccccatcaaaagagagtccaccttctggcttcaaggatagcgccaaagcgccttgttcgaggtttaacccgccagaatgatgagtgttgagggccagttttccttttccatctcgtttcagccctgcggttgggccatcaccctgagcgccatcaatgatttcatatgctttataggcttcatcaatcaaatgggaaaaggcttccggcataagccgcacaccagatttaaaattcgctttcattgagtcaacgatattgatttctttatcagtcatcatattttcctcaaaagccgtattagacagtcactgtcttctgtatggacatcatttgacattctcaaagatataaactgcactggcttcagacgcagagccaatcttcattgaaattacaccaaccgccaaactcgtccccgccttattcaggccgacagccccgccaaaactatctaaattgtctgaattgcctgaagggtccaaaatctcgataggtgtttctatattccacttattattcagacaggtatacacatacacccgggaagcggcacccactgccagacgatctcccgcatcattcagttcgatagcgcggccaaaatacgttacgtcacttgaaggggccgaaaacttaataggattttctctatcccaaatcccatttgtgcgtgtatacagataaacctccctaacaatattcgtggacttataaaaacccacccccacagccagacgatctccctctgcattcaggctaaaaaccttgctgaaaacagatgattgaccttcaaggtgactgaacttaatggggttttcgctatcccagatcccattcgtgcgtgtatacacataaatcgtgcttattgtgaaatcatcgtaaccatgcaccgccagacagtttcctgcggcactcaggcggacagccttgccaaattcataagaactcgaagggaccggaaacttaatgggattttcgctatcccagatcccgttcgtgcgtgtaaacatatggaacgtagaatgtaacgcagatttgaattcgcacccagtcaccagacaatctcccgctgcgctcaagctgacacccaggccaaagaattcaatgcggctcggagccggaaaccaaacgggctttcttacattccagacgccatttgcacgcatatgtacaccaaccctctgtctgaacctatttgccaacgctaggcaatctcccgccgcattcagactgacatcccatgaagaatcactttgataagactcaagcacaataggcgtgcttgtattccactcaccactcttccggcgcgtatatatacagattttagtattcatcccaaccgctaaacggtctcccaccgcattcaagctaacagaattgccaaacctatcaaaatcagaagcagggacattaagtcagcttaggagaaatgtccagaagaaattaaggtttaatcattcgatactggctcaaacttgatatgaactacgtcgtcaacttaagcaaagtagccatgcaattaggaaaaaactctcgttaacttatactaattaagaaaaagcggcgttattaaggtgctcaaaaccgatatcgaaaataacccattaaccgacatgcctatatcgcccaacggaacatatatagaaggttgaactcagctacggggagataaaacgtagacaatgaaatcatgcgtatacacttatcatcagcgtattgaaagcattcattaaaagtgacgaacgagcctcatttcctacaatttagttcgtctagcagctcatggtgtaagccctagtgcaaagtttttacgatgtgt

SEQ ID NO: 32 - DNA, 182624 bp, Photorhabdus luminescens
  misc_feature (892)..(892): n is a, c, g, or t
  misc_feature (111719)..(111719): n is a, c, g, or t
  misc_feature (114208)..(114208): n is a, c, g, or t
gtcgtctgtttcgctgtcaagtgtttcattggttgttatttttatccactcacaaaatgctataaaaaagaaaatttagtaaaaatgtgaaataaagtgtttcaaaatgtaaatgagagattgttttttaatctctggttggtccagttgatcaaaaaagtgaaaaatgactcgcggttagtggcggaagaaaattacctgttgatcttaataaaaagagtaaaatgtggtgtttatttcatcaatcatatttcttatacgtaacttactaatatgcttgtcgatatgttgcatatcattttttaacagatacctgataatgattcttcttggaagaagtagtgctcactttaagtgagcaccatacacatgttaattggattttctattaatctacctaattcatttcagattgttagaattgatataccaaacctatacccacagcgttattcgtattgacatcaagatatttggtgaagggggtgtcatggactaagttgattttgtaatcaacataggcagacaaatttttgttaaagttataataagagccaatagagatatattttacccagtcttgatgagtgaaaaaagttgttcccctggattgaacatatgccagagatgggcgcagaccagaatccaactgatattgggcagttaattcgatattacgagtttttgcagagacaatatcttggtagccgaaagaggtcatattgtgagtttcgccatacatggcagccagatataggttgtttgcatcatatttggcaccaacgttccatgcctcagccttttcaccacgagcgacagaggtaacgagcctttcatgtgtaatagggcggtcagcattggagtaggctcctcctacgctgataccattgcntatatcgtaggtaacagagaggccgaagccgtcaccattactaccaccattgggcttactacgactaccgtatttactgtgtgaattgcggctgtttttgctgtcttcgtcgttcttaccttggtattgcagggcgaagttcagaccatcaaccagaccaaagaaatccgtattacgataagtcaggacaccggtagcacgattagtcatgtaggtgtcagcctgcgacatggaatcagcgccgaatactggcagtacatcagtccaggcattgacgtcatagagaacaccgtaattacgaccgtagtctagagaaccatatttagccaattttagacccgcgaaacctagacgggtttgattaccttcggaatcatttgcctcaacttggttggcctgaatattgtattcccaacgaccataaccggtcagttggttattgatttgggtttcacctctgaaacccagacggacgtagcttgcatcaccatcttcactatagatagggtatatatctgatttttgggtaattttagcgaattgatgccgtacatcaactttgccataaaaatccagtttattaccgtttttgttataaatttcagcggcatttgctacaccagcagtcaacagcactgggatgaccgcggaaaagatactacccttcattattgttaccttcatttaattactatcgttaatgaccatcattggtgttattcggatactgttactgacataaataattcctttaagaaactcgttgaaattatttatgaaaatatcgtgttgtccgagttggggcacagtttttcattagccgtggattttatctatcatttaattgatacaaagtgacgatttttgtaataaagtgaaaataatatattgcaaaatgtaaatgaaataggatttttgatcgtgtcttgaattggaagaataaaaaaagccagcttttgctggctttatacataatgattttttaatgtttgttttacgcaatcattagaagtttgcgcttcttggtgtgcgcgggaaggggatgacatcacgtacatttggcacgccagtcacgtaagcaaccagacgttcaaagcccagtccgaacccagagtgaggaacggtgccataacgacgcagatcacggtaccaccagtaatcttctttattaagccccatctcttccagacgcttatccagcatatccagacgctcttcacgctgtgagccgccgataatttcgccaatgcctggtgcaagtacatccagtgccgcgacagttttaccgtcgtcgttcattcgcatatagaaggctttaatatcttttggatagtttttcacgacaaccggagcttggaaatgtttctctgccagataacgttcatgttccgaagaaaggtcaactccccagaagactggattttcaaatttctggccgcagttttgcagaatttcaatggcactggtgtaatcaatctgagcaaagtcagaattaataaatttttccaggcgggtgataacatctttatccacgcgttcagcgaagaattgcagatcatcagcacgttctgccaatgcggctttgaaaacatatttcaacatattttcagctaatgtggcggcatcattgaggttagcgaaggcgatttctggttcaagcatccagaattctgccagatggcggctggtattagagttttcagcacgaaaagtcgggccgaatgtgtaaactttgcttaatgcacaagcgtatgcttcaccgttcaattgtccagatacggtcaggaaagcttcgcggccgaaaaaatcttggttgaaatccacttcacctttgtcagttaaaggcagattttgtagatccagcgtagagacgcggaacatttcgccagcaccttctgtatcagccgccgtgatcaacggggtggaaacccagaagtaaccattttcatggaagaaacggtgtagtgcttgagcaagggtatggcgcatacgagcaacggcaccaatcaggttggtacgtggacgcaggtgagcaacttcgcgcaggtattcaatgctgtggcgtttagcggccatgggataggtgtcaggatcttcaaccagaccgatcacgacgattttcgtcgcttgcagttcaaagttctgcccttgaccaagggaagcaacgactgtccctgtcacttcgacagaacaaccggtagttaaatgcagaacttcatcctgataattgggcaaattattattaacgacggcctgtaatggattaaagcaggaaccgtcatagacggcgaggaaagagatgccagctttagaatctctccttgtacgtatccagccgcgaacggtgacttcactatcaaccgcaacccggccttgcagtacgtcgactacaggcgctacgctcatagatttctctcttctttatcagttcaagtttatgaaaatgaatatccccacaaggggcaacttattctatgttacttgccctgtttcaggaaacaaggggaaatcatcaatttaaacggtgaaatagaggggaaagcgcacttttcagatgtgctgctgctttatctgccagcagcacagtggtattttttaatgaaacttgagttaacaagcttgtttaacctggggtatatcaaaagcggcgcgtagcctgttaacaaactcgttatcttcacaaatggttttgccagggctgtctgaaagctttgcgaccggtttgccattacactcgacaagtttgatgacgatgttcagtggcttaacccctgggatattgcaggtgagctgtgtaccgataccgaaaatcaggtttattctgttgtggaaatgacgatagagcgctagtgctttttgaaagtccaagctgtcagagaacactaaggtctttgtcattgggtcgatacccagtttttgatagtgggcgatcgctttttcaccccattgaacgggatcacccgaatcatggcgtaagccttgataatttttggcaaactgggcatcaaagtcccgcagaaacgcgtccattgtaatgcagtcagtcaaggcaatacctaattggttaggatattctttcagccaactctgtaatgcttctcgttgactgctagccagatccgggctgatttgctgatgagcttgaaaccactcatgcgcttgtgttccaacaggagggagcccaagctgttgtgcaagttggtaattactagtgccaatcagataagggaaatgctgttgcagctcactgacgacagcgtgttgaacacggtgtgagaaacgacggcgtgtaccgaaatccatcagtttaaaactggagagatcgattccttcattttcagcatgttgatagaacagtttgatcaacttgcgtagctggttgacggcattttccaccgtattatctggtgagtgatgacgatgaattaattcactgattaacgccagtaatgggacttcccacataatcacttcataccataatcctgaaatatggatagctaattggccgccatttgtaacagaaatattgacttgctgtgggttaaaacgaaaggtttttaaccagtccagataatcagccttgaaaaaaggcaggctggaaaggtaattaaattcagcatcggttaatgccagatcagccatcatattaacttgatgacgtaattctgtggcatattcacctagcagttcgtcgccgcggcagcgaaactctgcaacaacaggcatgtggctgtagcggtggtacactgcttgttgcatatgaagtttataagcgtcagtatcaagcagtgatttaataattggggtagcgtctagtgtcatagcgcgttatgcatcctcacggagcgtattcgtattagctaaatcgataaagttggaagagtataccgggattattttgttattgaagtcacataatgtcatatagttcaccaaaatatcgaagctaaacagggcctttggttaaatgttatcatgttatttgatcattaagtgataaccagcaccaaagagtaaacaaatttcttacataacatcatactcgttcttaatgaatgttaaacgccagaaggtgcgttattcactcttgaaattcaacctctttctatggcagcgtaaggtctaatattgaattaattccatcaggcatgaaacaaaaggtttcttatgacacaacagcgacaagctaagtaccgccgggattatcgcgctcccgactatacgatttctgatattgaactcgatgttaatcttgatgccgataacacggaaatcaccgcaatcagccagataaaacgtctgagtcacgaaataacgccattagtgttggatggtgaagatttgacactgaaaagtcttcatgtgaatggtcaaccgtgggtgcattaccatgaacaggagagggcgctgatcattgagcagttgccggttcagttcactttgaaaattgtcaatgagatccatccatcgaaaaatacggcgctggaaggcttgtatgtttctggtgatgcgctttgtacccagtgtgaagcagaagggtttcgccatattacttactatcttgatcggcctgatatattggctcgttttaccacgcgtatcacagccgatagagccaagtatccgtatctgctttcaaacggtaaccgggttgaacagggagaaaccgatgatggacgtcattgggtgaaatggcaagatccattcccaaaaccatgttatttgtttgctctggtcgcgggtgattttgatgtgttgcgcgatacttttacgacgcgtagtggccgtgaagttgcattggagctgtttgttgatcgtggcaatctcgatcgggctgattgggcaatgacctccctgaaaaatgctatgaagtgggatgaaagccgttttggtcttgagtatgaccttgatatttatatgattgttgcggtggatttctttaatatgggcgctatggagaataaagggctgaatgtctttaactccaaatatgtgctggcaaaatctgaaactgcgactgataaagattaccttaatatagaagctgtgatcggccacgaatatttccataactggaccgggaatcgcattacttgtcgcgattggttccaactgagtttaaaagagggattgacggtattccgtgatcaagaatttagctctgatcttggctttcgttctgttaatcgtattaataatgtgcgtgttatgcgttcggcacagtttgcggaagatgccagcccaatggcccatccaattcgtccggataaagtgattgagatgaataacttctataccctgactgtgtatgagaagggcgcggaagttatccgtatgattcataccctgctaggtgaagagcaattccaggcagggatgcagctttatatccatcgccatgatggtagtgccgcaacatgtgatgattttgttcaggcaatggaagatgcatcaaatgtggatttgtcacttttccgtcgttggtatagccagtctggtacaccagtattaacagtccgcgatgaatatgatgcagaaaagcagcaatataagttgcatgtcagtcagatgacaccatctaccgccgatcaaaaagagaagcagcctctgcatattcccctggatattgagctttatgacagtaaaggtcatgtggttccgttacgttatgatggtcaaccggttcacaatgtattgaatgtgactaatgcagaacagacgtttgtatttgatgatgtgccatcactgccggttccctctttattacgggaattctcagcaccagtgaaactggattacacattcagtgatcagcaattggcattcttgatgaaacatgcccgcaatgcgttttcacgttgggatgcggctcagtcattgatggcaaactatatcaaactgaatattatccgttaccagcagaagcagccgatcgaactgccaatgcatgtggtggatgctttccgcgcggtgttattggataaagagattgatccagctctggctgctcatattttggctttaccatcagagagtgagatagcagaactgtttacgattattgatcctaaagcgattcatgaagttttggatacaatcacccgtactttggctcaggaaatggctgatgaattcgcggtggtttataacgctatcaatatcggtgcatatcgcgtcgctcatcaggatattgctcagcgctctctgcgtaatatctgtctatattatctggcctttggtcatcaagagcaggctgataaagtggtatcaaatcaatatcatcaatctgacaatatgactgatgcgttggcggcattatctggcgcggtgctggcagagttaccttgctgtgatcaactcatggcggaatttgatggtagatggcatcaggatggcctggtgatggataaatggtttagcttgcaggcaagtagcccggcggtagatgttttggctaatgtacgccatcttctgaatcatcgttcatttagtatgagcaacccaaaccgggtgcgtgctctgattggggcatttgttaacaatccggttgcatttcatgttgaagatggcagtggttatcaattcttggtggagattttgactgatcttaacagccgtaatccacaggttgcttctcgtttgattgaaccgctgattcgcctgaaacgttatgatgaaaaacgtcaaaacatgatgcgtagtgcgttggaacagttgaaagcattggaaaatctgtctggtgatctatttgaaaaaattaccaaggcattagaaagctgatagctattttttatcaggttatcgggctaacggtgatttagcccgatattttttccaatttatgccctatggatttcaagatgcatcacggcggcaagggagtgaatccccgggagcatagcaaactatgtgaccggggtgagcgagtgcagccaacaaagaggcaacttgaaagatgacggatataagtgttgtcaccaaagcagatctaacagttgctactgagagcattaaaaccgatattggtactataaaaacagatttagattggattaagaaactgacattagcagttggtattgctgttgttattgcggcattgaaatacatttttattggttgatgcttgtagtatgaaaattgctcaagatattaaagagcatccattggtttgctcccctttgtagttgttcgagagaagctaagtatcttgggcaaaaatgtcaacgattgtagttaccagtgtattcttgtttcacgcgcaacatttggaaaaaatttgcttctggtgagtatatttctgtagattcagcccatgttattcggttaccctatctgccgaaatattggggggttgaaaatgggcgttctttagctcagaaacttccaaatggtatctgaatgtgtcatgtgtagctttatctttgtaatttaatgtttataaattaattaatgggtttagaattatgtgctacccactagccaggaaagcgttgttccagcttgatccagaacacgcccacgaattaaccttccgccagctcaaacgtattaccggtactcctttcgagttttttatccgccagtcaattgcgacaaagcctgtgacttgtatgggcctgtcatttaaaaatccccttggtctggctgccggccttgataaagatggcgattgtattgatgcatttggtgcaatggggtttggttttattgaaattggcaccgtaaccccacgtgctcaggcaggaaatgataaaccaagattattccgtatcgtcgaagcagaagggttaattaaccgtatgggcttcaataatcttggtgttgataacctggtagagaatgtcaaaaaggcaaaatatggtggagtgattgggatcaatattggcaaaaataaagataccccagtagagcatggaaaagatgattatttaatctgcatggataaaatttatcctcacgctggttatatcacgattaatatttcttcgcccaacacgccgggcttaagaacattgcaatacggcgaagcgttggatgatctattatcggcgattaaaaataaacagggtgaacttcagcaaaaataccaaaaatatgtccctgttgcggtaaaaatcgccccggatctttctgaagaagagttgattcaaattgcagatagtttaattcgtcataatatcgatggtgctattgccactaatacaacgttagataagcgcttagttgaagggcttaactattgccaacaagctggtgggttaagtggccgaccggttcagttacgtagtacagaagttattcgtcagctctcccaagaattaagagataaaattcctattatcggtgttggtggaatagattcactcaccgcagccagagaaaaaatagcagcgggggcttctttaatacagattttctctggatttatctatcatggtccaaaattaatcaaagatatcgtcaatcatatctaaatcttgctgttaatttatcattgggggtttatttttgcccccaactcgtctatattcactctgatcacctaatttttatctgtatcttcgcatatcttttaattatggcagggcttatttcactgaatagctggcaagttatttacaatctgtttggcgatgtaaattttcctggcatataccctatggatttcaaggtgcatcgcgacggcaagggagcgaatccccgggagcataggtaactatgtgaccggggtgagtgagtgcagccaacaaagaggcaacttgaaagataacgggtataaaaggataattcatgaatattaaacccgatgaccaatggcgctggtattttgatgttaaccatgaccgtgtaatgctcgatctgtctaatggtatggtttttcgttcctgttttcctgctaagatgttgataccctatgcaatgggagaaacttcattttctgtagaagatgcgacgctttattattgttttgaagaacagacacgccgaattaatatttcagatgaatccagagctgaattagttcttaatgcgttagtggctttccgctttattaagccacagatgccaagaagctggtatttttctcgttttgccatgatagagaagccggtacaaggagaactgattcaggtacggctccaggattgcgggacagatgctatattcttggtcgtagaggccggggatagtgcgagcctttgtctgctagctcaaccacaattaacattatccgatcgagtaatgaacttttgtgatcccattaagattatgaatgatcgattgatgccatttgtggaatctatttatatgccaatttatggcactgcgatttgatttgggtttaagatcccattgttctgtgatttcaagagtaaagagactttttgaaaatagagcgacaagtcagaagataatcaccgtttttaattaagaaaattgttctttatcatttgaggaaattttatcgcatttacatcttcccatctgattatgagtaagtcactcttttcctgtttcctgtttcctgtttcctgtttcctgtttcctgtttcctgtttcctgtttcctgttggctattatcacagagacttgcctattatatgtgatagctatagcttgttcatttggagttggtgtgaaaaatagataagaaatattttaataatttcctcccctttggataacattagctccgagatggggaggggggatattgaagttaattagcacgattttcgaagattaattgttctgcgtgatgggatattgctgctaatgcgtcatgactggagtaatcgtcttgaacgatttgtgcgcgttgtttaaataagtttgtacgtagcatattttccactgtttgcttaagctgagattccgtcggttgtgctgtatccagattaataccgcatccagcccatacgacgcgaaacgctgtttcctgtttgccttctcctgtatcggcaatgagcaccggtgtaccgtggttaagggcataattaatggttccgtaacccccgttggatattagcaatgaagcttttggtagccagtgctcaaatgagataaattcttcgatacgtgcgttgtcaggtatgttctctggctgtatttctattgaactaccaccggtggttgctaatacacgcacaggtaatttagccaatgcacgtaatgtggggaaaattaactggtttagatcagtattagacatggtgccctgagtgactataaccaatgggcgtggatcatcttcttcccataattgaggtgattctgttatcggagcagggttagggagagggccaataaaatggacagtatcaggcaattcctctcgtgggtattcaaatgccagggttgaaagttgcaaaaaacgatcagaacccaaaataacttcatcgttgaaaaatctggttaacgtagtgcaccctgactgagctaatgcgtcattgaagctatcctgtacttcggttatgagttgtcgggtttcctcgtctacgagttgttcatgtgtcaattctgatggtaatagtgcgggtgggatacgtggcccccagaaaatggaatctttcgaagagtaagccagaggtgttatgccaatgatgatcacaggaaggcgatgagctttttctttttgcagcagtggcaatatgccataaaagcaattctcggctatcagtaattctgcttgttgttcatggatgatttgttgtagttggcggtcgaggaatgggattgggctacagaaaaaatctttaaacgcgagtgccatttgcagatttcctggcggcagatgcgctcggtcgggaaaacgttgttttaaatggcggtaatcaaagtctatctgctcatcaaaagggataaattgtgcgtttaaagcttctacttgttggcgaaataatgcgccagtgaagacagttacctgatgtccttgtgttatcagtgattgagttacctttaacatcggatagacatgcccgggtgttgcaaccgctgcaatgacaattcgtgccataatttgctcctttgtactgttttgatttaattacgctagttagctcctgactcagagtgtgattattttatgactacggttataaattcattacaaaaataataattaacccgaattctgcttaatccgtcattgaaaaatcgtcttctgagtagaaaactttcagtgatggcttcttcaatttaaggcagtaagcaatcaatccacctaaaacgcacaacagaaagccttttatacttcggtggcgggaatgctctatttgagaaagagtttttaattgcccattaatcgtttcaatgataaaacgcttttttaacattatcttatcccactcagcttgcatactcgctttcatgttacgccgttttttcgtgatgaaagtgacatcggttttagctaaatcgtccgccaattcctggctgaggtaacctttgtcaccgtaaagagaacccgttaattcttttgataattcacgaacaggttcccgatcatccacattacccggagtcactttaagcgcgagaatttcaccctgatgattgacaaccaggtgtaatttgaaaccgtaaaaccagcccattgaattttttccgcgctttgctatccccgcaaagaccttatgtcgagggatgcgaatgttatggcagacactcaaacgggtggaatcaataaaagcaatgcctgtgggtttcccttttaattgagtcagatagctgcataatggcaccaaaacggaaggagccacactgacaaaacgaggatagctaagcaaggttggaaaatccttatggtgatatttccaaatatgttctagataaaaatgtttaaaatcacggtaatgcgacatatgaaaaaggatcaaaatggtcatgatttcactgggatacatatgaccttgtcggcggcgtaaacgatgcccgctatcgagacaaaattgttcccattgagggatgaaaaaacggcaaaaatcatcgacatcacagaaaatttcaactaagttgtccatagcctgttcccccctcggagctgtttttggtgcacaccaaaactttgctcctggaacaggcttctcgtcaatttcttatccagaattcgggttaattaattatgacaataataactttgatttattttttcataatgtgatgaaatatgctggtttcctctccctgtcggtctgtgttagcaccaaaacggagaggaaagaagaaggtatctagggtttagtgaatgtggctttgtgcaagaattaattgttctacgtgacgggatattgctgctaatgcatcatgtcttgcgtaatctttttggacaatttgcgcacgttgtttaaacaagtctgtactcagcatattttccactgtttgcttaagttgagattcagtgggatgtgctgtatccagattagtaccgcatccagcccatacaacacgaaacgctgcttcctgcttgccttctcctgcatcggcaataagtaatggtgttccgtggctgagagcgtaattgatggttcagtagcccccgttggatatcagcaatgaagctttcggcagccagtgctcaaatgaaataaattcttcgacacgcgcgttttcaggtagatctttactcagtgtttctaccgatctgccaccggtggttgccaatatacgtaccggtaatgtagccagtgcacgcaatgtggggaaaatcaactgatttaaatcggcattggaaatagtaccctgagtaactataaccaatggacgtggatcatcttcttcccataattgaggtgatgttgttgtcggtacagggttgggaagtggtccaataaaatggactgtatcaggcaatccttctcgtggatattcaaatgccagagttgagagttgcaaaaagcgatcagcaccaaagatgacttcatcgttgaaaagtctggttaatgcggagcctcctgactggactaatgaattattgaagctatcctgcacttcggctatgagttgttggtcggctttatcgacgagctgttcatgtgttaattcaggtggtaataccgcaggtgggatacgtggtccccagaaaatggaatctttcgaagagtaagccagaggtgttatgccaatgactatgactggaagacgatgggttttttcttcttgcaacagaggtaatatgccataaaagcaattttcggctatcagtaattccgcttgttgttcacgaataatttgtcgcagttgatggtcgagaaatgggattggggcggagaagaaattcttgaatgcgagtgccatttgtacatttcccggaggaagttgagcacggtcgggaaaatgctgttctaaatggcggtagtcaaaatctacctgttcatcaaaagggacaaattgtgcatttaaagcttctacctgttggcgaaataatgcaccggtgaatacggttacctgatgtccttgtgctatcagtgattgagcgatctttaacattggatagacatgtccaggggttgcgagcgctgcaatgatgatacgtgccatgacttattcctttctgtgttttggttgagttgctttagctcctaattagagtgtaatcattttatgacagtagacataaattcattatcgtaatagttaattcattattgcaataatcaatatgattgattttttggtgaagttatgaaaagggtccattaatttcctccccttaggccatgttagtgccaacatggggaggatgataacggaatcaggatttagataacgcctctttgttgaaaaattaattgttctacatggttagatatttctgctaacgcgtcatattattaagaataaggttattctttggaatacaacagcaggccagaatgtggccattttctttaattgctgtggcttttaaaggaaaaacatctcctttaattaaagcaattttacaacatccacatatgcctgcccgacatgaataagggactcttattccttgttgttccagttgctctaaaatagtttgttgattgttacctgtaaaagtttgcctgttatattcgataatgacagattgctcatttgtttttggtacatcaatattctcagctttttcactgctgccatattgacgtgggtcttttttagctaatacggtgacattatctccgattcgaataataccactggagcgagcaattaaattctgaccaaaatcgatatcaccattctctgctgtccggaatgattgcaatgttgttaatggttctccgtttggatttttaatgcctttatcaatgctgaccgtggtcagaatacagcggctgcatggtttgggtaagtcaaaaataacatccccaatctgaattgattgccagctatcttccgcaaatgcttctgcgccggtaatgacaatatttgggcgaaattgttctaatttaatactggctgggcaacgttgttgtaataaatgaaatgagacttcattaataagcagaaatggataaccatccgcaaatgataatggaatttcggggtgtttttttactctgcgggttaattcatggcttaaccagcgtaattgcaccggaatgtcaaagaaactacttagccattggttaacagtttctggtgcaatgagagccgtaaaatggttgccccatacttccgttggttgctgttcaggcaggaaatcacgataaagtaccgtggcgttttctccgttgggcgcacgcagataaataccattatttaacatagctggagtaaataacagcatctgagggtatttacgggcagtaataaaagttccatctgtcgttgtgaccataaaattgcgatcaaatatgaggccactttcactgactaatgcatgggaaagttgcaaaccacgcatagattttactgggtgggtatacaggcgagacagcgtgatcatccattaatctccacaaaacatttttctgacatgcgcaactttatgacatgtcatccggattggctataatgcgtaacaattttctttttggtgatatgtcatatgaactctctgtttgccagcacggcgcgtggattagaagaattgttgaagaacgaactggaaatgctgggtgcgcaatcatgcaagattgtgcaaggtggagttcattttcaaggtgatggcagagtgatgtataaaagtctgatgtggagtaggctggcatcacgtattttgctaccgctaaatgaatttaatgtttatagcgatttagatctctatcttggggttcagtctattgattggagccaggttttttctgtacatagcactttctctgtgcatttcagtggtacaaatgaagagatacgtaacacgcaatatggggcgctaaaagttaaagacgccattgtcgatagttttactcgtaagttggatcaacgcccgaatgtggcaaagcagcagccggatgttcgtattaatgttttcctaaataaagagaaagccagtgttgcattggatttgagtggtgatggtttgcatatccgaggttatcgcgatcttgctggtcaggctccgctgaaagaaaatctggctgcggcgattgtccaacgttcaggttggcagatagggactccaatggttgatcccatgtgtggttccggcacattgttaattgaagctgcaatgatggcggctgatcgtgctccgggtttacatcgtgatcattggggctttactgcttggttaaaacatgatgaagcaatttggcgtgaggtaatcacagaagcgcagatccgctttcgtaaaggtcttcaggagacaacttgccgttttgttggttctgatattgatcgcagagtgctggatatggctcggtcaaatgctcgtcgagctggggttgcgcagttgatcacttttcagcaaggtgatgccagtcgtctggaaaatccattaccagaaggccctgctgggacagtattaagtaatccaccttatggtgagcgtttggaaagtgagccggcattgattgcactgcacagtttgtttgggcggataatgaaaagccgtttccctagctggcgtctgtcgctattcagtgcgtcacctgaattgctgagttgtctgcaattacgggctgaacgtgagtttaaagctaaaaatggtccactggattgcgtacagaaaaattatctgttgtcggataaaccgcattcatcagaggtgaatgtggcggaagattatgccaaccgtctgcgcaaaaatgaaaagaaattagctcactgggcaaaacagcaagggattgattgttatcgtctgtatgatgctgatttgccagaatacaatgtggctgttgaccgctatgcggataaagtagtgattcaggaatatgctccgccgaaaagtgttgatgctaataaagcgcgtcagcgtttattcgatgttatcagtgcaacgatgcaagttcttggactctcatcaaatcaattagtacttaaaactcgtcagcgtcagaaaggcaaaagccagtatgaaagaatggcagaaaaacaggaattctttctggtaaatgagtatgacgcaaaattctgggtcaatttaactgactatttggacactggcttgttccttgatcaccgtattgcccgaaaaatgctaggtgaaatgagtgaagggaaagattttctgaatctgtttgcctataccggagcagcaacggtacatgctggattaggcggtgcgcgttcaacaacgacggttgatatgtctcgcacttatcttgaatgggctgaacggaacttacaggctaatgaattaactgggcgtcagcatcggctgattcaggcagattgtctcgcttggttggcacgggccaatgaacagtttgatttgatttttattgatccgccaactttttccaattctaaacgaatggaagatacatttgatgtacaacgcgaccatatcatgttgatgagacagcttaagcgcttgttgcgtcgtggcggaacgctgatgttctctaataacaaacgtggttttaaaatggattttgctgagctggaaaaagttggcttggtggcagaggaaatcaccagtaaaacccagtcgcaggattttgcccgcaatcgtcagattcacaactgctggctattacgtcatgctggtgaggaaaaataattactatgtcattgatcaatttatctggtgcgtggttgtcgttcagtgatgcaccattacttgataatgcagaattgcatatagaagaaaatgaaagggtttgtctggttggccgtaacggtgctggaaaatctactttgttacgggtattagcaaaagagcagccgttggatgatggtcaggttatttaccaacaggatctggttgtcgctcgcttacaacaggatcctccgcgtaatgtagaagggacggtttttgattttgttgccgaaggtgttcaggagcaggccgaatatattaaatcttttcatctggtctcccgcttggtggagcaggagccaaatgagaaaaaccttaaccgcctggcagaattgcaggaggtactggatatccgtggattatggtcactggatagtcgcattaatgacgtattgaaacagctctctttacctgcggaagcgaagctctcttctctttcaggtggttggttgcgtaaagcagccttgggaagggcgctggtgagttcgccaaaaatcttgcttcttgatgaaccaactaaccacttggatattgatacgattgaatggctggagaatttcctgaaagattttcagggtagccttgttttcatttctcatgaccgttcatttattcacaatatggcaacccgtattgtcgatttggatcgtggtaagttagtatcgtggccgggtaattacgataagtttcttgaaagcaaagaagacgcgttgcgtgtggaagagatgcaaaatgctgaatttgatcgtaagttggctcaggaagaagtgtggatccgtcaggggattaaagcgcgtcgtactcgtaatgaagggcgtgttagggcattgaaggcattacgtattgagcgtttacaacgccgtgaagtaatgggaaccgctaaaatgcagatgggagaagcgagtcgttccggaaaaattgtctttgagttggaaaatgttaactatcaaattggtgaaaggaaactggtcaataatttcagtgcgcaaattcagcgtggggataagattgcactggtagggccaaatggttgtggcaaaaccactttactgaaactgatgttaggtgagctgcaatctgatagtggccgtgttcattgtggtactaaactagaaattgcttattttgatcagcatcggatagcacttgatccggaaagaaccgtagtggataacctggctgaaggtaaacaggaagtgatggtgaatggtcgccctcgtcatgttctgggttatttgcaggattttctgtttcatccaaagcgggcaatgacaccggttaaagcgctttctggtggtgaaaggaaccggttgttgctggcgcgtctgttcctgaaacccagtaatctgttggtacttgatgagccaaccaacgatctggatgtggaaacattagagttgctggaggagctggtagagaattatacaggtactgtattgctggtgagtcatgatcgtcaatttgttgataactccgtgacagaatgttggatttttgaaggtaatggtgcgatcaataattatgttggtggttattacgatgctcagcaacagcgcgaacaggttgtatcgttgcgccagaaaaatgcgaaaaaacttcaaacggaagttaaagtagaaaagattcaggaaccgccaaaaaactctcgtaacaaaatgagttaccatttattacgagagttagagcaattaccatcattgctggagaaactggaagaagagcttgatcagttacaatctcaagtgagtgctcctgaattttttaatcagcctcatgtaataacccaaaaaatattgactgaactgtctcaaaaagagcaagtattagaagcggcttttgatcgctggcaggaattggaaacattgaaaaacagttaatagttaacataattagcagaatcatactgcgaaattcttctgagtatgattctgtggatattcccgatttccttaacaggagaaagatcttgtgttccgctaaccatcatcatgaaatggtattgtgccctcaatgtgatttgctggtgacattgccagaatgggttcagggaacgaaggcaatttgtcctcgttgtaagacgacattagtcacatggtggaaagaaccaaaacatcagccaacaggttatgcagtcagtgcattatttatgctgttaatggcttgcctgtttccgtttatcagcatgagtgtggcgggaattagcagtgaaattaccttatctcaaatccctcaggtgatgtttaatgaaaattacgtcagtgtgggaacattctttttgctctgtgttcaactggtgcctgcgttttgtatggtagcgattattctcttgtgccagagtgttgttatttctcagaagataaaagtctggttggccagaatgttatttcagatgaaaagctggtgtatggttgaaatctttctggcaggggtgttagtcagctttgttaagttaatggcttatggtgatattgggttaggtttaagttttttgccatattgtctgttctgccttctccaggtgagagcatttcaatgtttggatcgccactggttatggaatcagataacactcgcacctaaggtgaatataccgttacaggcaggaagatcggggttagtgcagggtgttcgattatgccagtgttgtacggctattttaccggcagaccaattggtatgttcacgttgttatacgcgtgggcatgcccgtcgtcgcaacagtctgcaatggacaatggcactgatagtgacagctttaatgctttatattcctgctaatatcatgccaatgatggtgacagaatcgttaggtaaccagagtgattccactattatggctggagtgatattactgtggagtgtcggttcatacccggtcgctttagtcatttttatcgctagtattatggtgccatccctgaaaatgctggcaattggctggttgtgttgggataccaaaggtcacggtaaacgggattcttcccgcatgcattttatttatgaagttgtcgaatttgttggccgttggtcaatgattgatgtatttgttatcgcaatattgtcatcactggtacgtatggggaaattgatgagtgtctaccctgctatgggggcagttatttttgctttagttgtgatcctgactatgtttgcggcaatgacatttgatccgcgtttaatttgggatagagccaacgttaaacattcgttataaggcaatgaaggggtgtcaaggtgacggataaagttgaagaccagagtcaggctaaaatcgataaaattaaaagttggtcgccagtttggattgtaccaattgtgacagtgcttattggtgcttggatattgttttaccatttcaaccaccaagggccggaagtgatgttgattacctccaacgcggagggtattgaagctggaaaaactaaaattaaaagccgtagtgtggatgtcggcgtagttgagagggtcatgctgagtgataatcttagtcaagttattattaaagctcggctgaatgatggcatggaaaacctattgcgtagtgacagcgctttctgggtagtgaaaccgcagattggccgtgatggagtatctggtcttggtacccttctgtctggggcttttattgagcttcaaccgggaacaaatggtgatgaagaagataaatttaatttgttggactcaccaccattggcttcacctgatgcaaaaggtatccgcgtcatcctaatcagtgataaagcgggccagctcaatccgggtgatccggtgttgtttcgtggttatcgggttggttctgttgaaaccagcgagtttgaaccgaaatctcatctgatgagatatcagctatttattaatgcaccttatgatggtttgttgacaagcaatgtccgcttttggaaagagagtggtattacctttgatatgtcttctcagggggtacgtgttgaaatggcttcgttatcaacgctgtttggtggtggtgtcagttttgatgtgcctaagggttgggaattgggagagccaattaaagaaaaagctatttataaactttttgacaaccaaagaagcattcaggattctttatataccgaacataaagattatctgttgcttttctctgattccgttcgagggctacagccgggtgcgccagtagagttccgtggtatccgtatggggactgtggcaaaagtaccattctattcagagggaatgagacagcggttagataacgattttcgtattccagtacttatctcgattgaaccggagcgctttgagaaggagttgggagaagggtttgatgttgagaaagagctgaatagcataactaaacgcggtctgcgggcgtccctcaagtcaggtaatttgctgacaggggcactgtttattgatttggatttctatccaaatgaaaaagggtgggccgggccgtatgaaattgcaggttatccgctattaccgacaatcagtggtggccttgctcaaattcaacataaagttattgcagcgttagacaaaattaataatatgccggttgagccaatgtttaatcaggctattcgcactttggaagagagccagaaagcgatcagaaaagcacaacagacccttgatgaattgaataaggtgctggcgaatcctgaaaccaaagatctgccaaaagatatacagaaaacattgcaggagtttagccgcagtatgcaaggttttcagcctggctcaccggcttataataagatgttggataatatgcagcgattagatcaagtattgagtgaactgcgacctgttctgaggacgttgaataataagagcaatgcgttagtttttgagtctaagccaattgaagatccagaaccgaaaaaggctaaaaaatgatgagaagattggcattaattttagtgatttttatttctgcttgtagccgtcagccagaaaaaacttactatcaattgccggtagtggcaatagcatcacaaaagagtgctattgtgcagcatgatcgccaattatgggtacaacgggttatgttgtccgattatctgtcctcctccggtgtggtgtatcaaagtagtgatgttagttatgtcagtgcggcgaatcacttgtgggcaagtccacttgaacaacaattacagcaagtgctggtagctgagttgactatggcattgcctcagcgtttagtttctgctcaaccattggttaataagcccgatactctagacgtgacagtcaccagttttcatggtcgttatgatggtaaggtgattttgcaaggttactggacattaactcatcaagggagtgtcgttaaacagccctttaatctagagctaaaacaggaagaagatggttacgatgatttagtccgcacattggcaaaaggatggagtcagttggtgcaagctattgccagtcaattaatttcccaatcataaccctctgtcattctccgagtgtaaaacttttgcgctcggagaaaattggtattatcagtaggataaaaatttttctttattattaatacgttatcgttttttttgtactgatataacaaatattacattaatatgaatttcttgacttgattttcaaaatttataggggtatttctaaattgtggttggataaatgatgaccactgttttctttctactgatctagcttatgaggtaaataaaagcatgaagagacagaaacgagatcgtttagcacgagcattatcgagagggtaccatgcaggtattttggggcgtccaagggagcattgtccctattattcattagatgcccgttctcattggttaggaggatggcgtcaggctatggaagacagggcgatgatggcttagtctgccaaactgatggtataggttaggtgagaaaaacctccattccttatcaacgtggtatatatcccaaatttaatctgacagtgactgattgtttatacagatatctgtcagattgaatcctgtaagttttctctgtccagattttctttcagttgtgactaaagtaaaaatgctcgtaccgtgtaaaataagtttttcccggcgtcaatggcttaccagctatttattaaattattaaattattaaattattaaagcatcgtgtaatgaaagctttaaataagattccaaaatagtgccgcattttataccaccaataatttcataacaatgtgttgaagaaggttatgtgtagcagaattatgaaacgttatttaatgcattgtatgtaataaatcgataagtattatcaatgtcaggattacaattttttcatgttgttgtgctgttatttgcgaattaggtaatatgtgaatgagtggccgctaggtgacatatcctatttaacctattcaacatgatgactgaaattgcggccattaaataatccatttgctaaatacgagagatgatggtaattcaataattgcagtaagatgggtttgataaacatttatgatgtaattcaacccaaaagagacggctatattcttcaatcccatcgactgatatggttatagtttcatgacttgtataggctgtttgaagcaatgataatagcgtcgatccgccattaatcgtacatacccacctaaatccctggacacgggtaggcgtcgctatttttccatagcaatctccatttgtgttaggcgcttttagcatttcgacggtaccgtcaattctatcgagttttgcaatggcagttggtgtaagagtcaatgcgatgattatgagcagtatttttctgatgttcatataatattacctcggtgtgtttgttaatattaatcatcaatcttaatcattattaatgcttttacctgttatcagtatgctttggtgagcttgtttgatatatcaggtcaatttgatcatagcacaatttgccaattgtatactgattggtcagcgacaattgggtgtttgtaatgcagatattcaggtgcggatttgtgttatttctagtcgagataggccaaagttaggacttgatttgatttttttctgtatgaatattgaatcctatactctgagatataaccggaattacctttgagggagcaaaaatagcaccaggtatttttttaagatattgattacttggtagtatgcttttagtgaaaaaaggtgaaaagcaattagccagtcaccttccttttcgatatgttactgattattgattagaaagcgctggtatctttaaacaagcctactttcaaatccgttgccgtatagatgattttaccatctactaacacttcaccatcagccagtcccataatcaatttacggttaatgacacgtttaaagttgatacggtaagtgacttttttagccgttggtaatacttggccggtgaacttaacttcgccaacgccaagggcacggcctttgccttcaccgcctaaccagccaaggaagaacccaaccaattgccacatggcatcaagaccgaggcagccgggcattaccgggtcatcaataaaatggcagtcgaaaaaccataaatcaggggtaatatccagctcggcttctatgtaacctttatcgtgggtaccaccgttttctgtcatttcaatgatgcgatccatcattagcatattaccagatggtaatggcggcccattttctccgaacagctcactgcgtccagacgcgataagatcttcttttgtgtaggatttaagtttatcaaccatattatcagatagccttatatttagtgtagggtaaataatagagtacacttgtacgctgaacaactccgatcagacattctaaattaacccaaccagcgaagaaaccacgggaatttaggtcgttcctgattattcgcctgtgttatacggtcttgtatcatagctaacaagtgtgtttcttgttgatcataataagggatacctgtcaataaaggcagtgcttcagaaacatgttttactgaccataaatgaaatttttgcgcttttaccgcatctacaatgggttgattaaggcataaatgatggatattcgctgctggtaggatgacaccttgttgacccgttagccctctgcggtggcatacttcaaagaaaccttcgattttttcgttaataccaccgatgggttgaacataaccaaattgatctactgcacctgtgacggctagttgttgatcaatgggttgcagggaaagagcacttatcaatgcgcataattcggcaagagaagcgctgtcgccgtcaacttcaccataggactgttcaaatacaatagatgcagagaaaggttgtggttgatccaattttagctcggaaattaaaaatgcttgcataatcatcatgcctttcgcatggatattgccacctaactcaactttgcgttcaacatcaacaaattctccatctcccatatgggccacgcaagtgatacgggatggctctcctactggatcaggatggccgggatactctagcacagataacccattaatttggccaatgaccatgccttgggtatggataagaatctggcctttatgaatttcttctaaaccacgttcaggcagataattgtgacgccagcggcgattttcctctgcttgtttaattgattgagctgtaatctgattttcttgctgatagagtgccgcagtagtcagttgccgttgtagccagagcatatccaaaggcaggtggtgttgatcttctacatggcgggttgcttgttggacaagctcaggccaagcattatgatgcaatggaggtaattgccattgttgaatgagcccattgatataattgcaccacaggcttaaatcctgctcattatgaaatggcatatctagctcaaattcgccatatagagcgctttttgctaattcaggttctgtagcctgaaactcttcaaggcttagacgatctccaaccaggatcagacgtagctttaatggcatagaagggataggtaatggtaacggtttgttgctatccggagacaaccattcaaagcgttgctgaataatcatctgtttcaggcgaacccacattaagggctgagacagtagggtacgtaacggtagaataagtacaccgccatttacctgatgaatcagaccgggttgtaagtgaatttctccgttgtgagaatggaagcggccaaataattgctctgcttctatccattcacgataggcgacgcgtaactcaggtgtgaaatggcctgctgttgagggttgccagctaattttctgttgctgtatgtgataattgccaccaatttggggaagctctttcgtgagtaatggacggatagactcagctaatgctgacaaataaatatcacattcttcggctttcaatagcataaaaggctggcgggaatccatccggcaaaaaagctgtaaaccactatgtagccgtgattgaacggcttccatgctggcagacgcctgttgggaagcagaatgaaaaagcgcatcataaggaacgcaattcggcagtaatgcctgccagtctagtttgttagtggtcaaagtgatcgctgtatgttgtaaagtaggaaagcgtcgattatacaagattaagatataaaccaacatgcttgaatgtttgctattgcagacactttatgtaaaaaataattttttcaaaaaacggatattaatcagtttggctataagcaatttactaaaatagttgttatgcttatttttagttacgctgtcactgagaaagtaagatgaaatatcaacaactggaaaatttggaatgtggctggaagtggacttatctgatgaaaaaacatcaagaaggcgagctaattactaaatatattgaaaacagtgcagctcatgcagccgttgataaactcattgaacttgagagtgaaccggtaagggtactgaaatggattgagcagcatatgaatcctgatttatccaaccggatgaaacaaactatccgcgctcggcgtaaacggcattttaatgcggaacatcagcatactcgcaagaaatccatcgacttagattttcctgtgtggcatcgcttatctgcactttctcagcgacggggtaatacactgtctgaaactattatccagttaattgaagatgctgagcggaaagaaaagtatgccaatcagatgtccagcttgaaacacgacttggaagctattctgggtaagaaagagtaatttcagttgtgataggttgttataggctggtatcgccacaagcttcttaataagtttgatataaaatttcactatcggtaaaagaaaaccccagtctgacgatggggctttctgagcttttaatgattaatgataaccaagaaaggctattattgagcagattgagattgtgcttgagtaacaacctctttagtaccttgaatttcgatctctacgcgacgatctggtgccaggcagttgattaggttaggtttgtgaaccttatcacaggtagaaccagtgactgggtttgctttaccgtgaccttccgcgctgatgctgccggaagggatacctttagataccagatagtcaactacactttgagcgcgtttctgagacagtttctgattgtaaacatctttaccgatacggtcggtgtagcctaaaaccagtactttgccctgatttgggtcgatatttgctaactcagtatagagttgatccagattgtgcttaccttcggctttcagctcagaacttgcaaattcgaacagcacatcagaacgcagggtaaaacgtttattttcaacaacgggtgctggagctggtgttggagcaacaaccggagctggagcaacaattggggctgctgcttcatcttggccgaagcggtaagaaacacctacgctcaacagaccgttatcaggacgtgcacctactgaacctgcatccccgatattgttaacccactggtaatccagacgagtagcccagtctttagttatcgcatactcaacaccgatagctgccagtggagaaacaccggtatcatgatttttcagatgagtattggttgcgctataagttgctttggaatctgcccgccaaaccataccacccaggcgagtatagatatccaagtcatccataattggatagctcagtttggttgccatttggaaaccgtgggctttgaaggcaccattattgacgctgcctttgtaaggcatacggcctaaccagtcgtaacctatttcaaaacctaggtacggattggcttgataacctaagaaagcacccgcacccaattggtttttgtgagtagggccattaccgattgcactggtataaccgttaccgtagaaattcacgtcatggtattgggaccaacccaacttaccaccggtataccaagtgttgtcttttggagctgcttgcgttgcagttgtgaaagcggccactgccactgctaccgcgatagctatctttttcattttaacgcctcgttattatcatcacccaataggcaattggctttgggagcctttttacttactgcctaccccattaggctatttcatttgccattctttgtaataaaagcgaacactgagttgtgttcaaattcttcggtaccgttattgtgtgtacgctttgaattttacgcatttccgtgttcactgtttacccataagaatggcccgcactaatttatacccgtcatctttcaagttgcctctttgttggctgcactcgctcaccccagtcacatagttatctatgctcccggggattcactcccttgccgtcgcgatgcatcttgaaatctatagggtatcgtatcttttaatatctactaagataggctgttgagccatattgattaaagaactcagttaggaatactgcacttccataaaaccgatggactaaacaatacaaaggtagtaagtgcagtaacctttaatggtgtaaagtctacaacgaagttaaaaagttacaagtgccccttgattaatagagtaaaaaatttaaaagataatgtatgatttcaaaaaaactttactattctttacaactgatcttaccttaattaattgattttaattgtgatcagtggttcttggtctgaattggctattttgtgttatgaatattgcgataatgcttggttttagtcaatggtagtgaatggagtggatttttagtaaatccgatcgcgattcagcacggctagtttctttacttacatcttgtgggcgcataataaagcttagtgcattacctttttgtgccgcagcctgtaatctcacggtatcttttcccgataacgttggtaaccagccaagcaccacgctgtaattaccactcgccaatgctctttccattgcttctaccgttgtaatggagctcatgcgatttaattggataatcttatctaaaggtaatccagagttaattaaccattggcggctcagttttttatgtggactaacccatagcaaccagcgggcttcatttccagattggcgtaacaaaggtagcaatatacgattaatgaccgcttggttatcgctatattggttatcactatattggttattactataaatcaattcactcactatacctcctttaccctctttcaccataccctctcttttggctgactgatgtttagaagagtaaaaccaggatgattgaatgcccataaatgaacctcgccataattaactgtattaatatacagtatcttcatgccaagctaagatcaagtctattttttcaaaagagcttcgcaaatattgactgtaaatggctgtaaactcatttaaccattggcagataaaattggattgcgtatgtttttaattgcttgttcctgttatttattttactaataactggaacaaatctatggataagagatttatttgcacaaaactcatggagtgatctgtatgtttttgtctgaggtacgttttactcaactcaaaaatggtttttcttcgtttggggcactgacaaggaagccacagttcggcggttacagcctgttagctgatgggattatgttcgctattattgctgatggagaattatatttaagaggaaatggccatgctgaagtattatttaaagccagaggaatgaaaaactatatttactcgaaaaaaggggtgcctgtaactttgcgttattatcaagttgttgagtcactttggcaagatcaagagttgttatctcaatatgcgtatttggcttatcattactcatttattgaaatggcgggtaaaaagaagataccagagcgtttgaaggatttgcctaatcttggaatgtctttggaacgtcagttatggaaagtcggaatatgtaaagttgaagatttgcggttgttaggtgcgaaagccagttatttaaaactgcatcaatataaaagaaattctaatgttagtttgttacttgctttggctggtgcaattgaaggatgccattcagccgttttaccggtacagatccgtaatgatttattacgctggcacaaagaattggcttgttagatctttatcgtgaacagctaaaagaaggggcagtcaactgccccagtatgtcaatctggttataattgattaatttgtttaatgatattggtgattttaggtagcaattctattaataaactgatttgttgcaataccagttgctctttactatttctttctgccggcgcttgctcaattcttttcactatgttgacaggtatttgcttaattctatcatcgtctattaatatcgattttaatgctgtatcgacataacaaacggcatcattaagaatatccagaatagctttattatccaatttatctcgatgtgctcccagcgcagagatgtaacttagcatggtgtgatttaggcacaatagctggaatgctttttcttgagaagtttggtcacttttcggctcggcagacatgtttgaaatagcggataccagttctgcatcactattatgggcatcacggcgggcaattcgataggtcaatccattatcttttccctgataatattgaactaaaatggcatcaaggtagcgacagttggtattcatcgtccggtttatcacttgtgataactggcggaatttccagtctggccaaatgaaatttacggctaaccaggcgctaccacaaccaattaatgtatcaataattcttggtaatgcgacgtcaaagccttcacctaacaaattgaagcataataataccagtaatgtgataaacagggttgcatgtgcatattgggtgttacggaagacgaagaacaatacaccagaaatgacaattaacaccagttgcccctcaatggatggcacaaagtaaaggattggtaagccgatcaatacgccggcaacggttcctattattctcagtgttaaacggcggcgagtagcgctgtagttgggttggcaaacaaataaactggttagtaaaatccaatacccatgttgtaaatctaaccactggatcatggtgtagccactacatagcagaacagacatacggattgcatggcggaacagggctgattgtggggttagatgatggttgagccttagacagatatcacgccagccagtcaacgtttcgtcagatagttgagtctcatcttctctgtctttggaaagattgtatcgtccagaactcatacttgctaattgtgcatcaatcgcgcgtaggtttttcagcaaattatataaggcggtaatcttgaggttatgtttctgttgttgactgagttgttgcagggaactttccaaatagttaaatgcacgttcgatacgcggattgtgctggtatggtttgtgccaaagtatcgattgagcaatctgttcgcatacacgggcttgcacagagagaagacgttgaaagcggaacagaatatcgctgtaacggaaagtatgtaataggctctgatattgcacatgagatgaacttgcccgttcgtgaatatcttgtgcaacaaagtaataatgcagagtgtggtgagttccgcgttggcggttatcgcctttcagacgggtcagtagggaggttttggcttgatttagcgtgttaactaagacactgtttgccattgctacattaacgacagattgctggtatccttcttctattatatcgggatcaaacagattagctttagcatcaaggtaaactgcaagttgttggtaacaacgtgctagattgtcttgtaatgggcgaatagggaacagtaaatggcccgttagagttaacaggttataccagattgcacctgtcagcagtaataggggttgttgataccatagtgggaaaatagatgagccaagcatggtataaattgcgatcagcaacgcaccaaatgcaatagtggcataacgttgtccgagagctcccagtaagataaaactgcaagtggataacgccagtccaatggtaaaaagccagggataagggaacagtaattcaatagagactgaagcgataaagaaagagattagcgtaatcactagattacgtaaacgaccagtcagacgatcatcaagatcagcgagtgctgcggcaacaacgcccaaggtcaatgagatagttattttaggttctttatccagaaaccaaggcactagtgttgttccagccaaggcgattaggatacggttatagtagagaaaatgactgttataaagaaaacggcgtagaccagagaaagcagttagcacaaaatacctctgaggtaataataatggtcataaataacgataccctacggatttcaagatgcatagcgaactctgtgaccggggtgagcgagtgcagccaacaaagaggtaacttgaaagataacgggtatattatgataaaaggtttattagtgataaaaaactcttataagacataatttaactattttttaggtacggcgctcgataatggaacttaaagcaacacaaattggccaatgccttgctcagcatccttataatcgggtgcgcttgctgaatgcgggtattgaagtcagtggtgaaaagcatcaatacctgatcccatttaaccagttaattaatattcagtgtaaacggggtatcatctggggtgagttagagtttgaactatccgatggacaagcggttcgccttcatggtactgaatggcagcaaactcagcgtttttaccattatctgcttggtgaatggcagaaatggagccaggaaatgagtgatattagtgcgaatgtactgacagctcaggttagtgaaatcaacagaattggacaacagaatcgttggttgaaaaaagctgatttactccaattacaacaacaaattcaagcaacatttcaggctttaccgttgccattacagcgtctggaacaatttgatcattgccgggatgggtatcaaatttgtttgcgttggcttgagaatggcgaaaagtgtgttgaaaaaatcaatctgcaatggacagaacgtatgttggagcaacactgtgacttttttcagcggatagaagcatctcctttaaaccgttctcagagtctggctgttattaatggtgaaaattcagttctggttcttgctggcgcgggtagtggaaaaacatcggtgttagtagcgagagcgggttggttattacttctccaacaggcgattcctgaacagatattattgttagcctttagtcatcaagccgtcaatgagatgaatgagaggattcagagtcgtcttggtgtgaatgatattaaagtaaaaacgtttcatactttggcgttgcatatcattcagcaagggagtaataaagcgccaaaaatcagcgtattggaaacagatggacaaaaaagaaaagactttctgattaaacactggcaacaacaatgtagcgagaagaaagcacaggccaaaggttggcgggaatggctgacagatgagttgaaatgggaagtgccggaaggtgaattttggcacgatgaacagcttgctaaccgcctgtcaaatcggcttgagtgctggctggggttgatgcgtatgcatggtggtagtcagaaagcaatgatagagcaagttcaggaagagtatctggatcggtttcaaaaatgtattcgcttgatggagcctttattaaaggcgtggaaatctgaattgaaaacagaaggtgctgttgattactcagggttaatccatcaggcagtgaatattctggataaagggcggtttatcagcccgtggaagcatattttggtcgatgagtttcaggatatttcaccattatgggccaaattgctcactgcaatgcgaacccaaaatagccaaagctgtctatttgccgtaggggatgactggcaggcaatttatcgttttagtggcgcggaacggatgttgactagcgcatttgctaattactttggcaaaggtgctgaatgtgtactggatatctcttatcggcttaatgataggattagtaagattactaacgcgtttgtgcaacaaaatccaaatcagttaaggaaatcactaaatggtttgactaaaggtaataaaaaatcaattgttatcctgccagaagaccagcttgaacctttgttaaataaaatgagtggctatgtcactgagcaagaaacgattttattgctggcgcgttatcactatttgaaacctgaattactgaaaaaagcagcaactcgctggcctaaattgaaaatagaatttatgactatccatgcttctaaaggacagcaagcggattatgtgattattcttggtctgcatcaggggcaagatggttttcctgcaccagcaagggaatctgtgatggagtgggttttattgccacagccggaagatttttcggatgcggaggagcgtcgtcttttgtatgttgcattaacacgggcgaagaagcaggtgtggttgatgcaagacaagaataatccatcggtgtttgtacgtcagttagagcagttaagtgtgcctgttcaacgtaaaccttaaggttttgcgttggctgaaatattcagggctatcatgggatacctttcttggaaatcccactctgttttttcctggtatttgacgtggagaaacgtgtagttgtaggtatatgttgtaaagacttatttcagacgtccattcagataatgttgataatcaggtacttgaatatctactgattcagaaaatagaggagaactaacaataaaatccgcagacgctagattagttgcaacagggatattccatactgtagcaaggcgtagaagtgcttttacatcaggatcatgaggcacggaattaagtgggtcccagaaaaatatcaacacatcaattttcccttctgagattagagaaccaatttgttgatctccacccattggaccactaagcatattggtaacagataatccggtttcgttctgaatcagattaccggttgtgccggtagcgtataaatgatgtttcttgagtaaacttttatgttttttggaccaagctagcagcgaagttttacagtggtcatgtgcaataagcgctatatttttagcggttgccattgtgcgggttgtcaattccatgaggatgcctttggtaatcgttattgtgttttcgaatgcagtgaactcaattgataacaatgtttatcatatacattgtaataaataaacaaagtaaaaatatcgaatttaaggaggagcgaatgagtgaccagaaaattgcagacatactaaaacgagtaaaaactatcgcattggtaggtgcgagtgaaaaaactgctcgtccaagttataaagttatggcttatttactggaacaaggctatcaggtgattcctgtcagcccgaagcttgccggacaaacactgcttgggcaacgggtgtatgcacaactggcagatattccacaggctgttgatatggttgatgtattccgtaatgctgacgctgcatatgacattgcgcgagaagctatagatatcaaagcaaaagtgctctggttgcaacttggtgttattaatgagcaagcaaaaatattggcagaggaagcaggtctggatgttgtgatggatcgctgcccaaaaattgaaattccaagattgggactcgaaaaataatatttttcagcttgtagttatttggtttctaattagtggatgaagggaccctggcaccaatatctaatgtaaacttaaggcgttggatgagaagcggtgtccgggttccaagtgttcaaaataatgtttgagttggatattgagtttacttttctagacatcttataaaatctatttttacagttattacaatatcttaaggaaaatttagttgctcttattgctgctaaattttgccagaatctacacttttattgctataagatatggtgcttttgttgtgccctagttttgacccttttttatcatcaaaaaacaacctattaatttaaaagaaaaataaaacatctcctgaaaaaagggttttttaattttttatcactatattctttaacagtcagcaacttaaggttaatatgtaacagtgcactgccgtacaggcagcttagaaaacaagtaactattttcgttaccgtaaccttctgtgcactgccgtacaggcagcttagaaaatcaagtagtgcttacaaaggagaagaatgtagtgcactgccgtacaggcagcttagaaacgcataccaagcatcgaatccccgtttagatagtgcactgccgtacaggcagcttagaaataaacgataaccccatgcttctaatgattgaggtgcactgccgtacaggcagcttagaaatttccgctgtacgttgtactgcactatttaatgtgcactgccgtacaggcagcttagaaaatcaaagcacagcaacgaacaggcaaggaaagccgcactgccgtacaggcagcttagaaatgatacgtccacaggtagctattttcgttaccgtgcactgccgtacaggcagcttagaaaaagggagtggaccaaagggtaaacctcagttagtgcactgccgtacaggcagcttagaaaaatcaaactccagtcagtatcgctatccgtacgtgcactgccgtacaggcagcttagaaagtaaacaaacgaagtatcggtctgccgctcttgtgcactgccgtacaggcagcttagaaaagacgtgctccttgggtcctctcattaagtgtgtgcactgccgtacaggcagcttagaaatgcatccatcaacattaagcccgttgacgattgtgcactgccgtacaggcagcttagaaaggtagcgcccgatccctgattcagctttaagtgcactgccgtacaggcagcttagaaattacataggcggcgagttctgcactgatagaagtgcactgccgtacaggcagcttagaaagagatgaatgacattgcgcttcaatggcaaacgtgcactgccgtacaggcagcttagaaataacacatcagcaagctgttgctgtggcaagtgtgcactgccgtacaggcagcttagaaaacacgtcagttcgataataaaatccaggtcatgtgcactgccgtacaggcagcttagaaaaaaatgagagtaagacgattagatagcgatcagtgcactgccgtacaggcagcttagaaatttctctgtatcaataaccgctgttgtgccgcgtgcactgccgtacaggcagcttagaaaaatgaaattaatcgtttctcttacaatatttcgtgcactgccgtacaggcagcttagaaatactatgttgggatatgctgcattatctagaagtgcactgccgtacaggcagcttagaaatcttggcccacatgcgccacaacgtgggatgggtgcactgccgtacaggcagcttagaaaagtatgcaccttgcggaaagcgacaaagtggtgtgcactgccgtacaggcagcttagaaaaaatccccggtcgctatcagtaattgcatcaggtgcactgccgtacaggcagcttagaagcgcgataactgccttaggttgttaggtataatattggaggttaattgcgcagtcttggggccagtagttgatggcggatggattctgctagctcatcgagagaaggttgctctggatgttcatcggatgtttcataggctaattgtgcttcggccagataagtatgtacaggttgaccattgtcatcttccatcacaacgtgataccagggggcggaacgcagggtagcattggatgcaatgtcatcctcttggggttgttccagcgagtattccacatcaatatccacgatgactcccaaataacccagaagtttgtgacgtacttgttggccgataccgaatttgctggcgataatcatagtcacctccaaagaagtcttgtattgacattgatataagggcagtaaggtgaattacaagagctgtacccggtagttgaagccattttttgttttaaattgcaaatgtggcttcatctattttcaggttagctgtagtaaatataaaacacaaccaagagtcgtgtgcttaactatatatgtgagcgataccgcaaggtgactggttgattagggggtaattatgattaaatatggggtaacaatttatgtttatggccgggttcagggagttggatttcgctatcaaacttttcgttgggcgaaacttaataggctgacaggttatgtctgtaatttgcatgacggtagtgtcaaaatcgtagcttatggtgatagtgaacaactaaatacattaacccattggttggagcagggtggtcctccaggagcacgaatagataacttttcatctcaatcctgcgcagtggaggatattgcagattttattgtccgccactgagctagtttattgattagatacactttaccggtttcggtagcccggcgatcttagttgcctgttttgctggccctttgggaaacagacggtaaagatagcggctgttgcctttttcttcgccatacttttgtgcgatcgcttttactaacatacggatagctggggatgtattaaattccttataaaattcccggataaaacgaatgacttcccaatgcggttcagtcaaagtgatttcttcctgtttggcgagaagtaaagctattgcttcctcccagtcactactgtttttcagataaccttgcgcatcggtttcgatttcttgaccttcgaataccagcataatcattaataaccattaaagaaaagtagccgtaatttagcaaaaatcacttccatacccaagaatggtatgcacatgtgacgataaagtaagccaacaaccataaaaaagggtaaatttacggcaatcgaacagaaggatactttacatctgtctcggtgctgtttatagtgcacgccattgcggaggggtggccgagcggcttaaggcagcggtcttgaaaaccgccgatgggaaaccatccgagagttcgaatctctcctcctccgccaattctttctaactttatgtttataaacaattttcctaagattcacaccttactgttgcacatgagtgtaccacatcgttccaacggtgctggagaattcattcgtatgtgtactcatctttatcgtcgtgggctaatgtattatttccgccggagaatacctgctgatttggtacaagtttgtagcaaatctgaaatagttcaatctcttaaaacaaccaatagggttgaagcgctgatacgtcttcgtcaacttgatgtaaatttagacctaaagtttgcagaaatgcgtcttgggtaaggtagggataccaaattcactatcattgtaagtttcaaaagttttaccggagtttttatatataatctttattctattatttctttatcattatagttatttggctgaatgtattacaagcggttttatctgtaaaatcaatatttattatgagtggttaaatgcttatgtttattagtgatgtgaaaatggtttagtaaagtaattggatgtgaaatatattcagtagtttgcaaatataatatttggtggcttaattgattagcttttaattaaataatttaatagtggaatatgaacattgtatccaaaggtattgaattacctcataatgaacaataatgacaaattgatgcttgataaccgttaattctattaatccttatgttaggtaaatttcaaataatattgaaaagagtaccgtgattattttttaattggaatgtatgtggttttttagaattaaaaataaggtcttgtgattttttaaatataaattattaatttgatttttacataaaaatggatttatttaaatggttttcacctgcaataatatagattatttaaaatcacatttttaaaatatcagactttaataaagtttttgattgataggtgaatttagttataaatagattgaataattgaccgtgaagaatattggatggcaaaatatccaatggattatttaaagaaatatgaaattatttatagaataataatattgcatatgttatacccgtaatcattgaagatgcttgattttatccgaaatggagatcattatcctcgctatgaaaatatttattacatcagaacaaaaaatcaaacttgaacgtcttcacgacaccactcgtgatggtcaggtacgagacagaataaaagcgatccttctggcttctgaagggtggagttctgtgatgatagcccaggcattgcgactccatcagaccaccgttgaccgccatatcagtgattaccttaatcaaggtaaacttaaatctgataatggagggtctgatagtttgctttcccgagaacaaactgattttttaatcaatcacttatctcaacatcttttccatcacacccatgaaatcgtggcctatgttgctcagctctggaatattacctttagcattcccggcatgaataaatggctacaccgtcagggtttttcttataaaaaaccttgtggcgtccctcataaattcgacgcagaaaaacagcgacaatttattgaatattatgagaatcttaaagtcacagcgaaagacgaacccatcctttttcttgatgctgttcacccgactcaaggcaccaaactcagttatggctggatgcgaaaaggcgagaaaaaaaccgtcaaaacaacaggaagccggactcgcctgaatatattgggtgccctcaacctgaatgccattggtcgtacggtgttccaggaatatcagaccatcaacgactacaacatttgctgttttttcaatgaaataagaaagtcttatcctgactatcatcaaaaaattcaccttattgtggatggagcgggttacaacaaagctcatcttgtgaaggagtgggcttatgttagcaatattgagttacattaccttcctccctatagtccaaatttaaacccgatagaacgattatggaaggtcatgaatgaacaggttcgaaataaccgttatttcgcggataaacatgaatttcgagacaacgtcttcaaatttttcaccacaacgctaccggatatagcggactcgctgatgtctagaattaacgaccattttcaggtgctaaaaactgcatcttgaagtttcttgggtatagttaaatccagagtggttaaattctatttttatacagtagctataccctacggatttcaagatgcatcgcgacggcaagggagcgaatccccgggagcatagataactatgtgactggggcgagtgagtgcagccaacaaagaggtaacttgaaagataacgggtatataacgaaaggagattgaaacatgatgtattcagttaaaggtgttcaatatcaaacgttagtgaatatccctaaaaatattgggttaggatattctgggagtaacggtaaagttcaccttgttgatggtgacttcttattttatggttctgttgatattcaaggtgagaacgggactatcaataaaaaaacggaagttgatgctaactggacggtgaaatttaatgaaatgccttgtgatagtcagggtaatatcttgctcaaatctcactggtttagtcctgcgagcaatgatcgctggcttataaaagataaaatgcggctcatgattctttgctcaaaagaaccaactcatcgattgattcttgagaccggtgaaatcattgataataaagttgacaacgattatcttcgtaacatgatattttcttacaccataactacggcgctaatagtaagcaatgcgtttaacttaaaaaatgctctgatattttcagggcatttccttaattatagagataatccaccattgttcagatggaatggaatattagatatatgagaaaacaacctgatgtttttatttaatgatgggagtggttgctgaaatggtttatgtaaatgattgatataatagatgtatattctggaggtgagtcattataggattattagctaataataaagaatcattttttatctgtaatgtttatatttgctctcataataacatgtaatatagattatatctttaattaagctaattatatttctgaaaatatgaattggatacttgttaaattgggtaatactgaatttttcaatatttaagtacatggtgaaattaatgaaactgttggaatattggatgatgtcactattgaaaggggctgtgagattaagaggtactgatttttgtcgatgaccgaattcagtgaatggttccagtatcattgaacattttacaggcaacaattctcacttactgcatagatcttaggcttagaacagatgacttaagtatgtgatggtatttttgctgctaccttatttttaccctttttttgaagggagttgtaatttattgattttatggataaattaattatctcttataaaaagggtttttcactttttagtagttatgctatttaaaaatcagcaggttaaagttaatatgtaacagtgcactgccgtacaggcagcttagaaaaacaacaaaaccaacatgtcctccaccaatatgtgcactgccgtacaggcagcttagaaaaagcatcccgatcacttcggtaatatgaatgagtgcactgccgtacaggcagcttagaagcggcaatggctggagaagatgaacaggagtttcgccaacgctgtattagtggatttcaaaaagctgatgctttagacaccatgattgaggcactacaaacaactgcgcaacaattgagtcaggtggcacgatgaatattctcttagtttcccagtgtaataaacgagcgctaacagaaacccgccgaattttggatcaatttgctgaacgtaaaggtgatagaacttggcaaacggctatcacccaggaaggtttaaatactttgcgtaagttattgcgtaaaacggcacgtcgtaatacggcggtggcttgccattggataaaaagtggtggtcaaactgagctgttatggatagtcgggaatttgcggcgctttaactcacgaggagttgtacctacaaatacaacacaacgtgatgtgctgaaaagtcaggatgaaaatcattggcatagtgtagaggctatcagcttattggcagcgattgccgggttatttcatgattttggtaaagctaatacattattccagcaaggtttacagggtaatgggcggtttcaaccgtaccgacatgaatgggtgtctttgcggctgtttcaggcatttgttgcggaacaagatgatagggagtggatgacttcgttgagtcagattgagcctagtgatgaggataagattctttcccgtttggttaaggatgatatcgataaaaaatatgcaaacccttttgttaacttaccgccattggcaaccactgtcgcttggctaatcctctctcatcatcgtcttcctgtttatcctagttatgacgatcgatatgtacgcagaccacaattaaaagatattgatagttggctgattaaccacttagaaccgtcatggaactcaatcaacatggataataaggtctggagtgatcaggataaacgtgatgtctggacattcccaaatggtacacctatccgtagtcagacttggcgtcagaaagcacaaaaatttgcgcaaagagcgctgcaatcaacgtcattagtgcaatatggcaatctgaaccagcgtttcaccagtcatatgtctcgactggttttaatgctggccgatcatcattattcatcgttacctgcaactttgggttggcaggatgttaactatggggtatttgccaatactgatagaaccaccggtaagtgcaagcagcgattagatgagcacaatattggtgttggacagaatgctttactactggggagaagtttgccacatattcgtaaaacgctgcctgcgattacccggcataaaggatttaaacaacgcagtaaagatgaaaaataccgttggcaggatcaggcgttctatgtcgcatgtgctttacgcgaacgttcagtagaacagggcttttttggcattaatatggcttctactggttgtggtaaaacttttgctaatgcacgcatcatgtatggattagctgatgaaaaacaaggatgccgtttctctatcgctttggggttaagaacgttaacgttacaaaccggtgatgcgttacgtaaaagattgcatttagaagaagatgatttagcggtactgattggctcgcaggcagtgaaagaattacatcaactccgccaaaaggcgcttgagcctgatgtgggcagcatatccgcggaagcgttatttgctgaacaccagtatgttagttatgacggtagcttagatgatgggcgtctgagtcattggttacgtaaagataataaacttaataagctgcttagcgcacctgtactggtggcgaccatcgaccatttaattccagctacagaaggtattcgtggtggaaagcaaattgcacctatgttgaggttactcacttctgatctcgtgttagatgagcctgatgattttgatattaacgatttgtcggctttatgccgattagtgaactgggcaggattattaggttcgcgggtattgctttcatctgccacattaccacctgcgttgattcaggcattgttcaatgcttatcgtgccggacgccaagattatcaattagcatgtggtcaacctggtgctccggtgaatatctgttgtgcttggtttgatgaatatgaaacaacgcaacaggatgtggtcaatgcatatcagtttcaggaacagcataatattttcgttaataagcgtattggcaggcttaaaaaaatagtgccattgcgtaaagctgaacttgtgccgattatttctgaaagtcgtaagattaatgatgttattaatactatcgccgaagtgatgcatcactctatattgaagttgcgtgaggagcatcatcaaactcattcatcgggtaaaaccgtctctattggtttaatccgtatggcaaatattgatccattggttgctgttgcacagcggttattacaaatgccatctcctgaaaatgtgcgcatccattattgcgtttatcacagtcaacatcctatggcgatacgttctcatcttgaacatcggctggattccacattaacacgatacgatgaagaagagttgtggcaggtggcggaaattcgcaaagtattagaagagacatcggaaagggatcatatttttgtagtagcggcaacttctgtagctgaagttggccgagatcatgattacgattggagtatagctgaacccagctcaatgcgttcattgatacaacttgccggacgtattcaacgtcatcgacgaaaagaaccacgggagcctaatctgcatattctggcgaaaaactataaggcacttaaagcgactgatttaaaacatccggtttattgtcgcccagggtttgagtcgaaagattatctttttgctaatcatgatttacatgaattactggaaccttatcaatatgaactaatcagtgcattgccgagaataaaggaacgcgataatgctggagatagttcaccttttgaaaatttggtcgatcttgaacatcaacgtttatgggaagaacttcaaggtggctctgataataaacacggttactgctcagctctttggtggcgagaacaggcttcatggtgtgcagaattacaacgccataaaccatttcgtcaatcagaacctgatgaactacattatttgtggcttggagaagagggtgaagaagcgaagtttgtggctctggacagcggtcaggcagggataaaagaaagcgacacgtttgactatgtgccagaattagagtttgcacttggtgtgagtgcttggattgaacttgatactgagacgatttaccagaatttggctgatacaaatgaaatggagttaaaaaatgtaagccaacattttggtgagattcgtcttaggaagaaagatgacggagaagcatggcgttaccatccatttttaggggtgtttggagaaattggttgaatgacatgcagtgtttttaggtaatgatcgtggtgattgtcgttcgattcaatcaaactaagcgaatcgaacgatatttgtgagactacaaatatgtatgaactttctgccaatgaagttaaaactcactttggtgatatgctgctaagagcgcagcgtgctccaatccagattaataagaacggcaagcttgttgctgttgtcctatcaatagatgaatatgaaaacattgaagcgcttaagattcagcttttgaaatccagagcaatccaaaccaaagctgatattgaagaaggtaacctagttgatggtgaatcgttttttgatgaactagagacaggtaaatacgactaatgtcgattctctatcgtttaacaccggatgtccaaagagatctgatcgaaatccactgattcgagcgagaagtgatttaatgtgattgattgttttgaatcgagactagaggtggaaaatactaaatgtatttgcctgttatcacgtacggaaatcgaagaattttatgttcgtctgagtttaatgcctatggataacgcctgtattttgtattgagcctatttataacgagctgtactatgaaaattctatataaaattgcggattacccttcaaaagcacttaaaggagggagattatttttttaaagatacattgaacatttaaagaaataaactgtctaatgaatatgtcattggtgatgagatgtttcatggatatattcatcttgaattggcagaagaaacaagcttaataccgtgacttgattgataccctatttctcattaccactgtaataattttgggtgaaaataggatgatttttaggtattttgttgtgaaatacacagaggcaaaattttggtaaagcgaatgaacggaataaattaaaatacactggttagggtgatgaattcaaagctggagtatttattagtttatgatgtacaagatcatgttttcgagctaaatttagcagacaaccagataatcattttgataaggtaggtaagagcctatgaatgaaaatggattgagtcgatttattgtcgattatattgaaagccgtaaacagtcaaagttggaggtttttgataaagaggctgaaaaaaaattggcaaaactaacctctatggaggatattacgccagttaaacaaaagttagctgaacaacgcaaggaattggaagagcactatgaagttagaaattggctggatgatgcagttagccgagtagatcaaatccgcttagtgacacatgttctgaaatttgcccatactgatgcaagaggtagcagtattttcgcggtacaatcaaaagcaaatgtaaaagaagatattaaatatctttccatggcagctttagatagacctgctatagatgcggcaggaaatgcggctgctcttgatattgcgaaattattattgacagaatatcgggaaggtgattcattgcttgcaaatataaatcgggcagactattcagcactagctgaactggcgaaaaatgagcagcagcttgaattatggatcaatgggtttaggcaagttttatcagataaacgactttcttcacatagactagcaaaacagctttattttcctgtcggctatgataaataccacttattaggcccactattttcttcatctctagcgcataccatgcatcagcgtattactgaagcacgctttggtgaattatctaaagaaattaacaaagcgagaaaagaagaatcttggcgtcctgaaactatcgtggtttatcccaatactgctgtgcagtattttggcagcactaagccacaaattacctcttatcttaacaatatgcggggtggacgagtttatcttctaccatgttcagcccctgaatggaaaaatataactaaaccacctatgaagcacagatctatttttgatctgggctgtgaatttgtatcattagtccgtagcactgtttggcagatgcaacggtatttgttgagtgtacaaaaatatgaaaacacgttagagattcagcaatgtcgtcaggaatatgttgatgaaattattgatgttttgtttaactatgtcgtcggtatacaaaatttgattgagcttaaaggctggagtgccaatgaagattgtgcgttaaaacgtgctcaacaactctggcttgatccttatcgttgtcagcaagatgaaacgtttaaatttgaacgcgaaggtggtgactggaaaaaagagatagccgcagattttagttactggctgaatcagagtttaaagcatgagcggttagaaatgggattatctgaacgtcgtgagtgggcttctgtgtttaaagagcggttacgtgaatttgaagatgaattaccggaggttatgccatgagccatctgattattttgcgtaaaattaaagtagaaaatgcgaatgcgattacgggtataacttatggttttccggcaattacccactttcttggatttactcattctatctcacgtaagctacaaaaaagctataatctaaaactggaaaattgtggtgtaatttgtcataaccatcaacttcatgcatatcggtccgatccaattaaagataaagtttttgcattaactcgcaatccgttaaccaaagaagcaaaaacggcaacgattaatgaagaaggtcgaatgcatatgacagtttctttattaatagaatgttctggtgaaattgctggtgatacagaagctaacgaattggaacaatatttactagaaatatgtccaactcagagactagcaggcggtactatcactgaaattgctaaagtggatgttattgcttttccgcaagaaggacaggatacccgtaagttaatgcggcgtttattaccgggttttgccttgctagatcgctctgaattgttagctaaacactacgaagaattaaaacaggataaccctcaagcagagatgattgacgcctggcttgatttttccgctattaaaatgcgggctattcctaagcaggatgataagcaacctgaaattggtgacccggcatattgggagtatgttcccaaacctgcttcgggatatttagtccccttgatgacaggttatcaggcaatatcgccgctatatcccgccgggaaagtagataaaacccgtgatcctaatgctccattttgttttgttgaagcaatctacggagtaggtgaatggaaaagcccgcaccgtattgacgatattcgccagttactctggtgttatgactatcaagaaggagagggtgtctacaggtgttgtaatcaacagactgtttcccgtcaatccaaacccaataagaaagtaagaataatcgactgattaatttaaagaaggatatctacatgtctaaatcaactattaaaacggcttctgtactggcatttgagcgtaaactttctaattctgatgctttaatgtttgctggaaactggaaacaaatcgacggtgaatggaaacctattgctattcaggaaaaagctgtccgggggacgatttccaaccgcttgaaaaacgctttaactagcgatccagctaagttggatgcagagattcaaaaagcaaacctgcaacgtgtcgatgttgccgcattgccttttgatgctgatactctaaaagtcagttttacattacgggtcttaggtaatctttcaacaccatcagtatgtaatgatcaggattatcaagctgaactggcaaacgtgatcaacggttatattgctgaacatggtttcaaaacgcttgcagcacgttatgcagaaaacttggctaatggacggtttttgtggcgtaaccgggttggagcagaagaaattaaagttcgcgtaagtggtaagagtggcaaatggtgggagtttgattgtgaagatttcagcttacgtgaatttggtaaggtagaaggtaagttagcggaacttgccgccgaaattgaggaaggattggcaggcgatagatcaacattattcaatgttgaggcttttgttcgtttggggcatgggcaggaaattttcccttctcaggagttggttctcgacagtaacagtaaaaaaagcaaagtgttgtatcaggtcaatgagatcgctgcattgcattcgcagaaagtgggtaatgcgctccgcactattgatacgtggtatccagacgctacggaattgggtcttggcccaatagcggttgagccctatggttctgtaactagtcgtggtaaggcatatcgtcaacctaaagcaaaaatggatttttatactttgttagataactgggtcgttaaaggaaaagcgccagaagaagtagagcagcaacactatgttatagcgacgttaattcgtggcggtgtttttggtgaaaaaggtgaataaggggatcagatggattattaccttgaaattcgcgttcttcctgatcttgaattcagtcagcaaagcctgttcgaagcgttatttgctaaactgcatcgggctttggggcagttaagtaatgggcaggttggtgtcagttttccgtgtgcgagaaaaacactgggggatacgctgagaattcacggttcaagcgaagcgctgaatgacttacaagcattaccgtggttaaaagggctcagggattatactgaggtgattgatatccagccaattccccaagaaactaagtaccgctgtgtcagccgagtgcaggttaaaagcagtgcggaacgacttcgtcgtcgtgctattaaaaagggatggttaacgggggaacaagctcggcagcgtattcctatcagcaaagaacaacgtactcatttaccgttcttgtttctcaaaagtttgtcatcaggtcaaagttttctgttgtttgtcaaacaagggccaatacaagacaaaccgacgtcaggaatttttagctcgtatggattaagttcatcagctaccatcccttggttttgacccttttttagcggctaattataacttattgatttatttaagggattagccgctgctaataaaaagggtttttctgctttttatcattatgttctttaataatcagtaaattaaaggtagtatctaacagttcactgccgtacaggcagcttagaaacaagggcacgatttccctttggttttatatgcgttcactgccgtacaggcagcttagaaagatgtgcggaacaattcagtctgcaaatacgtgttcactgccgtacaggcagcttagaaaaatcgaagagcttcatccttgtgagtttcttcgttcactgccgtacaggcagcttagaaatgtccaaagagtgaagccggttcctcctcccggttcactgccgtacaggcagcttagaaaggctgatgagacagtccgataatagaacccacgttcactgccgtacaggcagcttagaaatggaatgcgacttcatcaccattttcaatcatgttcactgccgtacaggcagcttagaaatttaccgaaatcttttagagcgctagttgtttgttcactgccgtacaggcagcttagaaaaacatttaaaacattatttattgttactgttcgttcactgccgtacaggcagcttagaaaatttacgtaatgaccaatgacgatggacatgagttcactgccgtacaggcagcttagaaatcgtcgatttgaacgcgactcaagctgcaattgttcactgccgtacaggcagcttagaaaataccggattgttagtaaaacctatccactttgttcactgccgtacaggcagcttagaaacataagcgggactaacccgccattaatcaagagttcactgccgtacaggcagcttagaaatgttgagcagatgccaactcgggtagtgtccagttcactgccgtacaggcagcttagaaaggtctcgatgtgctggtgggtatcccggctgagttcactgccgtacaggcagcttagaaatcacgtcatttgtaccaatttactgacaacaggttcactgccgtacaggcagcttagaaaattagcgcagataaccccaactcggaagctctgttcactgccgtacaggcagcttagaaatcctatttttaaataaatcatacacctatgcagttcactgccgtacaggcagcttagaaagttgatagctggcgagatagcagcggtaagctgttcactgccgtacaggcagcttagaaatgtcgtgtttcatgtagtaatctattgcaactgttcactgccgtacaggcagcttagaaaatcaggagtacgcaagagccggacacagataagttcactgccgtacaggcagcttagaaaacctatgtgttctgccgactctttaacgtccagttcactgccgtacaggcagcttagaaaaattagcgaacaacgtaacattgttgattctggttcactgccgcacaggcagcttagaaaattacgcaagctgtcactaatgttgcgtgcccgttcactgccgtacaggcagcagcgcactcgattgagtgcgctaaaaaagcaacctattttcttctcgatatgcatcaattgttatgcttttgtgcatattctccactattaacccattgatggtctttttcccaggtaaatagccacttgcgggttggtccggccattacgttgagataatagttgtcgtaaccggcaagggttgctactgggtggtagcctttggggaccatgaccacatccttgttgtaaatagccattgattcatccagtgaacggtcatcggtatagacccgttgcatgcagaatccttgagaagggttcaggcgatggtaataggtttcttccaaataggtttcctgtggcgcattgtcggtatcgtgtttatggctagggtaggaactggtacagccttcgtcggtaaagacttcaaccaccaacaagctatcagcaggtttgttatccggtagaatgttgtgaacatagcgtcggttgtagccattgccacgttgttctgcatcaatatcctgtggcgtaatcagtcgagtcgggtagcttcctttacccggtgcttggcataccgcgagttcaagagcggtatcggcaataatttcaacagattcccccgcagtgatgtaaacagcataaggttttttgcgttcaaatggctgcatgcgatcgccaatatgctcaaaccgttgatgtggcgtagtcactgtggctttgcctgccactaaaaccagacaggtttcattttctgatgcgggcaaggtgattttttcacccgaagccaactcataaacatcgaagtggacatacttccagtttgctgattccggcgtgatatgttgagttcgtttgttttgatccggtgcatgatattttgataataatttggacatattatctaccctcagtactatttttgcatgaatcagattgtgattaattaaaacaatccggtatctctggcaaatttgcgtaaattgttataacccatcgtggcgtaggtcagtgggtgagcaacagcaggatcttgttctgcttcaactaccagccagcctttataattttgttttttcaacacttgaaaaattgccggataatccacacaaccatctcccggtactgtgaatacaccattcagcacagcatcaaggaaactggttttacggttttttatatcgttgagtacgtcaggacggatgtctttacagtgaacatgattaatgcgttttgcccagcgttctgcaacagccaatggatcagcgccggcaaaggttaaatgaccggtatccagcaacaatccaacttcatctccggtattttccatcagatgatcaacatctttctcagtttcaataaccgttcccatatggtggtgataagcaatctgaacaccttgttcttgggtgtaacgggcaaattcagtcaatttttcaccgtattcttgccagcggttagctggaaattgaggacgaagatggactggtttattttgatcgccgtgaatgcagtttgtcacttccgcaaataccatgacattagctcccaattcgcgtagcagggtcaggtgagattgtaccgctttaatctcttctgctactgaacgggtgagtaattcgccagagtaccagccagataccagtacgagattgtgggcggcaagtatgggacccaatacgttagcctgacgagggaatttgttgcccaattcaaaaccggtaaaacctgcctggcggccctcggttaagcaggtttccagaggtgtatctgcgccgagagtgggtaaatcatcattagtccaggtcagagggttgataccaagttgaacagccatgatggtgctcctagttgaataaaataatgctatccgcgctgacgccacaggctaatcaggttgtgatagttggtttttattttctggatcaaacggttatcatcaatctcattttttagccattttagggatggttgaccaaatagggttcttccgacagcaaaacctttgacgatagacttgccggctgcggcattaaagcccatttccagctcttcttgtggagcatcaaggccaagaataacgacgccacggcaataggggtctcgctgctcgatgagatagttaatgttgtcccaactttcagaactgagaggtgggagtttccaccaatccggtttaacgccaaggttataaaatcgtctaagtgcgcgaatatagaattcatctgagtgtttcatttccgcaggtagaatcacttccagtaaaagttcgtgaccagatttacagcatgcggcataaatttcccgaatttttttctcttgctccaggcggagtgggtgagcatcttctggatggaaaaacaccaggcatttgacgatgtgttccagtggccagtcaataagttgggaacctatgttgccatgttccagacaaagtgggcgagagccgggtagctcaattgggcggcctatccaccaaccttgaccggtaatttcgtttaaaacatcctgaccaaacgtgctgtcacataacaggcctatttttccttgtaaccctgcttctgtggcaacttcccggctggcgcgtaatagaagttgttttaatgatgaaatacgtttgatactggcatttgcttgtcgggctaattcgataaattgaatacgatgatcaaatgccatgacgcacagttcgtcccattgatttttacgggcgctgatacggtgaaggtgattaagtgtttcatccaaatcagggcgtagtatttgattggcgcgtgatagatagttatcaagctctgttttatctggcattgccggtgcgcagccatgacgagaaacaactaatgcgccacaggcattagcgtaagtacaggctttttcccaaccttcgttatttagatagccgcgtagcaggccggacataaaagcatccccggcgccgagaacgttaagcacatcgacagaaacgccctgtatagtgatgctgtcattcagatcattagggatttcagcggtaaaaatagagcatcccagtgatccccgtttgcaaaccaatgcagcagatgtgagtttacgaatgttgcgtagtgcttcgatagtatctgtggaaccaccagcaatatggaactcttcttctgtgccaacaatgaggtcaaatagcgataatacttcctgtagctgagctgttacctgttccgatgtgatataacgtgtttcaccatctcccaaagaagttaacccccaaagtaccgggcgataatcaatatccatgaccgttttcacacggttacggcgggcgtagttgagggccgtcagcaccgcatcgcgagtgttaggatgagaaagatgtgttccggtgatagccagacaacgagcggatgcaatgtattcttcactgaaatcatcaccggtaattgccatatcggcgcagttatcacgatagaagatcaggggaaaagtggttttatctttgattcctagcagcaccagtgccgtaaggcgttctttatccgtggttagatggctggtatcacagccaacactttgcaactcttccctaaggaaacgtcccatatgctcatcaccgactctggctagcatggaggatttaagcccctgacgagcggtaccataggcgacattaccggaagaacccccaagatattttgcaaaacttcccatgtcttccagacgtgctccgatttgttggccgtaaaggtcaacggcgattcgtcccatgcagatgacatcaaattttttttgctgctccattgaacaattccttattaagtacaacatcaagcgttgctatgatgagctccgacagtggaagattgataaaaataattaattaatttcagtgacattcacccaacgttgctcttgataagaatgagcaatggcatccagaatacgtgagactttccaaccttcggtgaaatctggccatatcgctttattgctggcgatgccattgatcaagtctctgatttccactgttttttgatcattgaagccgatgccgtgacctgcaccgagacagaatggcgcatagtcaggatgttctggtccaataagaatagttttaaagccttggcggtttgctggttcatcgtgacggtaaagttttagttcggccattctttcttgtgtaaagctcaaagcaccttttgttcctgtaatggtgtagctcaaacccattttgcgaccgcaagcaatacgggaggtttcaataataccccttgctccgctgttgaaacgtaccatagcatgtgcttgatcttcgttttctaccgcaaccataatgctagagccggttttttccgggcgttgtttgataacagtggtcatgtctgcgcaaacagtttggatatccccaaccaggtactgcgccatattgatgatatgagcagcaagatcgcctaatgcacctaatccagctttatctttgaaacagtgccagtggataggagtgaatggatcggccatataatcttcgttatgagtgccgtagaagtgaataacctcacctatttcaccattcgaaatgatctctttagccagttgtgcggtagggtttttcatatagttaaaaccgactaatgttttcactctggcttttttggcggcttcgaccattaattttgcatcatgtgagtttagtgccagtggtttttcacaataaacatgcttgccatgtttgatcgcttcgagagccatctctttatgaaggaaatttggtgagcagatatcaacaacatgaatatcgggatctgatactaatttgcgccaattatcagtaaaacgccggaaacctaattgctcagaccgttttgcggcgagttcagcagaaacttccgctaccatttcacaaactagtttgcctgccagagggaaaacagtcggcgcttgtgcgtaagcaatggcatgcgtccgtccgatgtaaccagtaccgattaggccgatacgaatctcttccatatagttgtttctccgaatagaaggaagcggataggtcgtttatacccgttatccttcaagttgcctctttgttggctgcactcactcaccccggtcacatcgttatctgtgctcccggggattcgctcccttgccgtcgcgatgcatcttgaaatccatagggtatattgttgcagtcaattctttagtgtttgccagttagccttggttattgtcgtatacctgttataggaaatatttgtttcattttcaacttaaatgaaaacattagttccaagttgtgatctgataagggtttttaggtaacatctcgttatataaggttaattttataatgagttaggtaccattcagaggtaagaacagaaaaaatagaatattagaatttttgtttcatttatggcttggtatatatggagtgtgtgttggttagcaaatctccaggatttcctctttcaaatatgggatgcagggaaatcctggcagtgagttattctgataataatattggagtaataaagtcagttatttattttatctacctgttctttttggtgtactatttattgcaagcttgctgaatagcgttttacctatctggtatagcgcataagatagtattaatgcagcagaaaggtaataaataatcatgattactttgggaacgttatgtgcaagaaatacgtatatagagattgaacatagtgtaattaaccatgcaacgggtttcaccatagaccaaggtgtaatatttacctgttcggtataaacatctgcaaatggtttagctggaaaaaagtagccaatagccaacatgaaaataacattgagaacaaataaaatgccaaccagatgaaaaaagtgcaggtcaatttttaaaataaaattacagataatataggcagacatcccgaataataggccaagtttagcggcaataggcggcactcgtttggtcatcagaccaactaataccacgctgagaattggcgcgttaaaaattccttgtaattgttgaatgagatagaacagaccatccggtgcattagcgactaatggtgcgacgatcatagtgattaacgctagcccgatccctagatatttactcatagcgactgtttgagtttcggtggcattttggttgattcgcggtttgtaaatattgacgataaacagtgttacagatgaattaagtccgccgctgaatgtggaaaataccgcaccgaccaccaccgcggcgaagaaaccaaccaatatttccggtagaattaaatggactaattctggataagcgttatctggattatctatttgtcctttgaaaatatggaaagcaataatgcctggcaaaataataatagacggcatgatgagtttaagtaaagcacacaacatgacgcctttttgtccttcggcgagattttttgcaccaagagccttctgaacaatggattgattggtacaccaaaaaaacatattggaaacaattaagccggtaaataatgtagagaaaggaaccagagaatcttcactaccgatggagttaaatttatcaggattagattgataaacttcaactaatccttgccaggcattgccattgccgacatagagcagagcaaaaatggttaccattaacccaccaacgattaagccaatgccgttaatggtatccgcggcggcaatggctttaataccgccaaagatggcatagaccgcacctaatccaccaacgccccaaaccataatccataatgccgtagttttatcaatcctgaatacattggaaacctgaaatagactttccaatgcaatcgcgccggtatacagcacaatggggagtagtgaaatgatatacatagccaggaaaagaattgaggtaataagcagcgtatttttatcaaatcggcgttcaagatattccgggatggttgaaataccgagtttcagatatttaggcaggaaatagatagcgaatagaacgattgtcaccgcggctatcacttcccaagccataacgataaagccagttcggaatgctaatccatttaaaccgattaaatgctctgtggacaggttcatcaataacatagagctaccaatataaacacctgtgagagatcgtccgccaagaaaatagccttcagtggattctgtcagacgagcattatgggttttgtaataagcgaagccagccactaataaggtaaaaccaataaatgagagaaaagctaacatactatcctccaagcctgattgactattttcaggcagcaatatgctgacgggaaagcggcctttcccgtttttagggtgaaaataaatgtgagtcagttagaaatgtagggctgttttataatctgatttctttacctgaatgtaaggattcgagagctttatcagccagataaagtgcctgttcgccatcagtgccattacattctggtgtggcacgacccgccatgacatcgacaaaatggtcccattcagcaatgtaggcttcccggtaacgttgcaggaagaaatgctctggcttggctgttaaacaaccgctgttttcccagagttcaacgctgttttctttgatgttgccggcgctaagcagccctttttcaccatgcaattcaatccgttggtcatagccgtacccggagcgacggctattggtaatggttgccattgcccctgatgggaatttcataacgataaaggcggtgtcaatatcacccgcttgcccaattgctggatcaaccagattactgccttgggcgtagatcgagcagggttcctcaccaataatgaaacgtgccatatcgaagtcatgtattgtcatatcccggaacataccaccagaacctttgacatattcagcagaaggaggagagggatcacgggaaataatcagcagagattcggcttttcctatcgcgccggcgtcaaacagggtttttactcggcggaattgcggatcataacggcggttaaagccaacaaataagggaacctgatactgtttaatcgttgcaaggcactgacgaacacgttcaatatcaagatgaaccggtttttcacagaagatttttttatgatgttttgctgcgagttcgatcaggtctgcatgagtatctgttgctgaggcaataagaacaccatctatttgagggtcagacattgcctgttcaatagtttgtctttttgtttggtattgctgtactaaaagttcagcacttttctgatggggatcgacaaccgaataaagagaagtttctttatgatgagagatatttgctgcgtgtacttgcccaattcgtccagcgccaaataatgcaatgttgaacatggatgctccttgatacctaagtatctgcttatgagatactttaaaatatatcaaataaaacatttatttcaatttatcaatatttggaaattatatttttgagtgtggcgtagcattttgttaataacaatattgaatttgtgttaattagatcacgtaaagtaagattgatactggatggagtggagaatttgtcctttaaaaacaaattataatatgcattcgactcactatatggttacgcttggttatagagattaatgaaaggaaaagagtcacttatttccagaataaaaatttcaaaaatggtattgaaagcggtgaggaaagggaaaatggcctgcaagatagcaggccactaacatctagtactgacgcactttggttgcaaccatctcctttattttttttgcggcagattctatcgctgggttttctgctacttgtgctgtgcctactcgccagcatgattcataatcatgcgtcattgttttaggtaacactttgatatctatgagtactggtaccgtctgtttttgggcttcctgtaacgcacaaagcagttgttgctcatcgtggactcggtaacttttgcagccgtagctttctgcatttttggcgaagtcgactttaatcagtttgccatccatgttgccgctttctgggttacgataacgattttctgttccgaaactgcccatcccttggctcatttgcagattattgatgcagccaaatcccgcgttatcaaatagcaacacggtgattttgatattttcctgtactgcggtttgcagctctgaatgaagcatcatataagcgccatcaccgactatggcataaaccggttggttggggcaggctagtttagcgccaatagcagcggctatttcatagcccatacaggaatagccatactcaagatgataggtatccggttgtttgggttgccataatcgctgtaaatcgccagggagggaacctgatgcgccaacaataatcgcttcgggctcaagatatttgtctaataatcccaatacgctagtttgtgtcaggcgggtttgtaatgtttggctgtactcttccaatttatcatcgagatgaccgggaatttctggtgtgaaatctgcctgatactcaatgttgaacagacgatttaactcttttctccatgtttcccgtgcctgatgaatctcatcttgataaccactgcgataattcaatttaataagttgttctgcaatagcgtttaaccctgcttgggcgtctgatacaacgggtattgcatccagtttgcaggcgtcgaattccgctacattgatagtgagaaattcaacttctgggtgctgaaatagcgatttggatgcagtggtgaaatcagtaaaccgggtgccaacgccaataatcaaatcggcctctttggcgatcaggttggccgcaagacagcctgttgtgcctaagccaccacaattaaggggatggtcggcaattacggtgcttttacctgcttgtgtttcagcaaaaggaatattgaagtgttctgcgaactgacgaaaagcgttatgagcttctgaatagcgcactccaccaccacagataagtaaaggttttttcttgcggtttatgagtgccaccgcatcgttaatcatggcgacagaagcaggacggcgttcaatgcggtgaattcgtttttggaagaaatagtcaggaaaatcccaaatctcgccttgaacgtcttgtggtaggcaaattgtgacggcaccagtatcggctggatcggtcagaactcgcatcgcattaatcatagcgctcattagctgttctggtctggagatacgatcccaataacgagaaacagggcggaaacagtcattggtgctgatagtatggtcgtggaactgttcaacctgttgtaagactggatcaggttgacggcaggcgaagagatcaccgggtaataacagcagaggaatgcgattagctgtggcagttgccgcagcggttaccatattggcggagccagggccaacagaggaggttacggcaaaaatctgtttgcgctttttctgtttagcaaaacctgtggcgatatgggccataccttgctcattgcatccttggtaaacggtcaagtgaccaggatcttgctccagtgcttgccccaatccaacaacattaccgtgaccaaaaatggtaaagattcctctgatgaatgggtattgctctccgtctgcttccacatattgctggttcaggaatttcaccaatgcttgagctgctgtcattgttgatttgttcatgttacaggactccattttattccattgttggcatcacaaaattgctggaatgatgttctagcctgatacttgctggccagcggctggtaacagttttcatgcgggtgtagaagcgaacgccatcattaccgtgaacgttaagtgggccaaaaattgagcgtttccagcccccgaagctgtggaaggccattggtaccggaatgggaatattgatgcctaccatacccgcttgtacatcttcgctaaactggcgagctgtttctccgtcgcgggtgaatatcgcggtaccattaccatattgatggcagttaattaatgttagcgcggtggcataatcgggtacacggacaattgacagaacaggaccgaagatctcttcttgatagattttcatctccggcgtgacattatcgaacagcgtcgggccaataaaatagccattttcataaccgggaaccttgagttgacggccatcaattaacaagctggccccctgtttttcgccactatcgatgtaatcacagattttagcttggtgttgggcggagataacgggacccatatcgttttctgtagttgcgacaataccgggaccgacagatattttgttgatctgttgacgtaatttttcaattaatgcatctgccgtttcatccccaatcgctaatacaacagacagtgccatgcaacgttcacctgctgcaccaaatgctgcacctgcaatagcactgctagccatatcgagatcggcatctggcatcagaatacagtgattttttgcgcctcccaacgcctgacagcgtttcccgtgagctgaggcggtagtgtagatatattcagcgacaggcgttgaacccacaaagctgacagcttgcacgtgtggatctgttagtagtatatcgacggcttctttatcgccgttgataacattaaatacgccattgggtaaaccggattgtttaagtagtgatgctaattcaagcgcgagagagggatctttttctgaaggtttcaatacgaaagtattccctgtcgctaatgcgataggaaacatccacataggaaccattgccgggaagttgaaaggggtaatgccaacacaaacgcctaaaggctgcattaatgaatggctgtccactcctgtcccggtattcgcggaatgttcacctttttgtagatgagggatgccacaggcaaactcaacgacttccagaccacgagttaattcaccgatagcatctgaatagatttttccgtgttcttctgaaatcaatcgtgccagtttgtctatattagcttccagtaatgttttgaactggaacatgacacgagcacgtttcagtggtgatattttagaccattctctgtaagcttgatgagcgatttcaattgcctgttcaacttcatgggctgtgcttagtgctacctgacgtatctgttttcctgttgctggattgaaaaccggcgaaaaacgggtgctataactgggaataagttgcccattaacataattctgtacctgttccattctgagcctcttttgcggatttgatgttagtactgaatcggaaactttgataatagatatatgaaatatatgttttattttcaatatgatttggaacaaaaggcaattaatgtgatcggcgtaaagtttctatgaattaccgataattaggtgactaattagatgttaatcaatatagtggtaataataaatcattacaatgaatggattatgtatttcatttttaactataaaaatgaaatatgattcagcttatacggtaaaacgattacaattgctggcgataaattttatgggggatttatgtctgtcgcatcgaatctaaatgaatttcaagaacaagtccgttcacgttatagtgggttgagtaaacgcctgcaacaagtagctcgatatgtgctggataataccaatagtgtcgcttttgatactgttgcggtgattgccagagaagctgatgttcctccatcaacattaattcgttttgctaatgcgtttgatttcagtggttttaatgaaatgaaacagctatttcgtatgcatatggtggaagaaaccgccagttatgcagaccgggccagattatttagagaactggatggcgaacaggaaccgcctgaagaccctcagcatattttgcaggaatttgctcgttcaaatgtgcaggctatgcaacagttagctgccagaacagcccctgaagatttaaggaacgcggtagacttattggctcaagctaagaatatttacattattgggctgcgtcgttcttttagtgtggcggcttatctttcttatgcattgaatcatctggaatgtcgtcctttactcgtggatggtttggggggaatgttcagggaacagattaatttaattggggaagaagatgttgttgtttcaatcagttttaccccttatgcagaagagacgctgatggtcagtgaacgggcggcaaaagccggggcaaaacagattgtgattacagatagccagattagcccgcttgccagctttagtgatgtttgttttgtggttaaagaagcacaggtggaggcattccgttctcagtctgctactttgtgtttagtgcaatctttggctgtttctctggcttatcggcaaggaaacacgatttaattgtgtatattcccgatgaacctctaatgactattgacccgcgaatcccggcgggttaatgctttatcaggtcagtagaaagcacataatttaaatagagtgtaaacctgatattgaaactggtttgttagacataaatgttgttgattcttattggtgataattatttaataattattctgagttatggttttgaaaagggatcaatatgatgagtaaaggatcgcgttacatttttgtcattttatctgcaatttctttccaggcatttgcctcaaattttgactacaaaagtgatattcctgctgataataagccatctgcggactatttgaagaaacgggaaaatcttcaacctaagcattgggatgtggataaactcattacggataataatgcggtggaaaaccgggaactggcaagacaggtgaaagaagatgaacttaatcggaagagccgagagtttaatgatcgtgtcaatgagaaaatccgtcaggatcttgagcggattgcgcgtattaaagagaataacggtatgaccagaagtaacttttttgatcgggaataaccgtgacttaaagcagttcgacagtgaagtgaatgactggtcgggaaaaataggcagtttgtcgataatcattgacactctttcgaaagaatttcctccattagcatgtgattatataccctatggatttcaagatggatcgcgatggcaagggagcgaatccccgggaacacagataacgatgtgaccggggtgagtaagtgcagccaacaaagaggcaacttgaaagatgacgggtataatgacttcgcactaaaggagaagaatatatggaaaagatcgaatggactgactttgagaaagtcgacatgcgggttggcacaattatttcagtagaattgaatcctcaagccagcaaacctgcctataaattacaaattgatcttggcgaattgggcgttaaaagctcaagtgcccagataacggtgcattatacacctgaacaattaattggccgtcaggttctttgtgtgtgcaattttccaccaaagcggattgctggtgtcaaatcggaagtattgctgaccggcagtgtggatgaaaatggtgcggtggtgatcgcagaatttactcttcctgtcccaaatggtcataagttattgtaaatcacactattttgttgtcgaatgaatggagtttattttaatcagcgacaatgaatatggctgttcaattaccttcattacatttacgccggtattctgccgaaactattagccatagccaccaagggttatggcagttcgtttttggctataacgggcaacttgagttaaacgtagaaggacaacaacgtaccgttagttttggaaatgttgtgatgatcccaccggatgcgaaacacagctttttcgctagtggtgaaaatcagcaattggtgctggagttgccttcggcactgtttaatccattacatagtgatgctttctggcaaccattacctgattctgtgcttgctcttattaagtggttacatgattacccgcaaccaccggctaatcacgctgatgctgcccgtttgctgctcgctcagctaccacaagtaggttcatcttcagcgttgatagttaaactacatcgggggcttgttgggcgtctgcatgagaaagtgacggtgatggatatggctaatatttgcgcagtatctgccagtaccttgcatcgtaaactttttaatgcaacagggatgagtccaatggcttatttaaaaacgtgccggatggaatttgcctataatttgttggcttacagtgataggactttggctgacattgcttttctgtctggttatgcctcccagtcagcttttacttttgcatttagtcaacattatggttgtactccagccaggttgcgtaaaggcaaatgatattttcagcattttatgacttgatgcacaatgtgattgtgcgtaatatacaaacaacgaggatgttatggctgttgaattcagggatggatggctagaaagattttatgaacaagatttaccgcacaaatgcatacctgcatctttacagcgtgcgttatacagaaaactacaaattttggatgcttcggttaaagaggctgatttaagaatccctccgggaaaccattttgaatacttgaatggctatttgaggggatggtgctcaataagagtaaataagcaatataggcttatttttcaatggattgatggtattgcggttgatacatatctggatcctcataactattaaactgagggaaataaatgatgaggaatacaaaacgtcgccctgcaacagtgggtgaaatattggtgagtgagtttctggtgcctttgaatatcgaaattaatgtgcttgcggaagctatgggtgttcaccgcaatacattaagtagaattgtgcatgataaaggttcgctaaccgttcctatggcgatcaaattggcagcggctttgggcaatacagcggagttttggcttaatattcaacattcagttgaactgtgggatgtgcgtaatcatgcctatcaagcggaatcactgaatgtaaaacagatagttaagctatcagttacagcggcaatgcactaatgtgtttgtttttaagaatacgaatgcgttgaaatacgtaaagccatcttatgatgagatagctttacgtgagtgatataccctatggatttcaagatggatcgcgacggcaagggagcgaatccccgggagcatagagaactatgtgaccggggtgagtgagtgcagccaacaaagaggcaacttgaaagataacgggtataaatattattgagctttcgcttctgatttatcagcactgttaagcaggcggcgaatagggacaattaataccattaatacggctgcacaaataaccagtgccaaagatacacgggagaacagatcaggtaggttgtccagttggtcagcgcgcacatgtccaccaattaagccagcagctagattgcccaaagcacttgcacaaaaccacaagcccatgacctgaccgcgcattcgagatggggccagtattgtcatcgttgcgagcccaatggggctaaggcacagctcaccgagtgtcagaaacagagaacttgatatcagccagaaaggagaaacggtttcaccggttgccagcacattttgcgcagccagaatcatcacgccaaaaccaccggcagcgaacagaataccaataatgaatttactaatgctgctcgggttgatgttgttttttgctaatctgggccagaaccaactgaatacgggggccagcaggataataaacagtgcattaattgactggaaccatactgtcgggatctcaaaccccatcactatacggttagtataatcattggcgaacaggttgaatgacgttggtgtttgctcgtatgcagaccagaagaatgcagcagataccagcaggataaaacagaccagcaggcgcgaacggtcactactgcttaagccggcaaacaggaacaaataggcaaagtaaagtgttacacaggatgagatcacatagaccattgcgctggctacggctaccggattgaatggaattacaccaaggattagcagagcaataatagcaatgatagcgataacagtggtaaagacccatttgccgacgttttcacgcttcactgtagggtggtcccagcttgaatccaaaccaccttctttatcatactgacgcatcaaagggatcgtgtagaaacggaatatcaatagggcaactagcatccccaaccctccgataccaaaaccccagtgccagccatagtcacgaaccagcaagcctgtagtcagaggagcaatgaaggaaccgatattaattcccatataaaatagggaaaaaccaccatcacgacgtggatcatcttttttatacagagttccgaccatcacggtgacacaggttttaaacagtcctgtacctaatacgatcagtaataagccaataaagaacaaataatgactgaagaaagcggaaagagcgatagacaagtgccctagtgcaataatgattgagccataccagactgcttgacgttggcctaaccagttatccgccagccaaccaccgggtagtgcggtcagatacacactacctgcaaagataccgacaatggcagcggcctgttcacgaggaatacccataccaccatcatagatggttgcagccatgaataagatcagcagtggacgaatgccgtagtaagagaaacgttcccacatttctgtgaagaacaaagaacttaatggataaggatgtccaaagaaagttctggttttcgtattgttaatggaggattgcatctaagttttcctataagactacactctaagagtgcagtgtgtgtgacaaataaagcttttaaaaagctcttttaaatttaggtttagagcaaacaaaaaagccacgtttttattaaataatgtcctatcttgttaatatatttttaacatatttttcgatcaattttattaacaagtaggatatctcttactttatattccatatttcagagcaaaatccgacataaatctcatttctcataattaataggctaaaatgaggataaaacctattgacttatttctatttatattcgatgtttttttatggaaaaaatattttaaaataataaattaaataataacggtaatatatacccaatggatttcaagatgcatcgcgacggcaagggagtgaatccccgggagcatagataactatgtgaccggggtgagcgagcgcagccaacaaagaggcaacttgaaggataacgggtatataaggtatcttttcaaaggctagatattaacggtaataatgaagggtaagaaaagtaacgtgatttgattgtcaatttagtatttattttgaaattttaaatgaatccttatttcttatataaaaattggaaaaaaattaaattaaaaaatatggcatcagcattgaaatgagatagtcaattattgagggataccaaagtgattatggctgtttcctggataaagaaacagccatgaatagatttaatggattttatcagcttgcccgtagagagaaggcatccccttaggccgggttttaaagcgacgatgcaaccacatatattgatcaggtgcctgtaaaatttcctgttcgacaactctattcatgaaagcagccgctttcacttcatcatcttttggaaatcctgccactgttggttgaataatcagttcataaccctttccatcaggcagacgacggggagtaaaggggatcattgccggatcagcgaggcgcacaagtatcgacgtgccggtggtggttgcagcgtgttctacagcaaatagtggtgcaaatacactttttcgtgggccgtaatcatgatcgggggcgtaccagacaatttcgccatttttcagacagcggatcatgcctttgacatcttttctatccagcatatatttgttggagcgcagtcgtccccatgtttgtagccaatccataactggattatcatttggtcggtagacgccaatgccaggattgagcaaaccgagaatgcgggcaccgagttccagtgtcaggaaatggataccaataacaataattccttgcccagtagtttgaattttctgaatgttttcttgcccagtcactttaaaccagcgttctatccgccagtcaggccaaaaccaagccatgcccgtttcaaatattcccattccgacggattcaaagttttttattaatagcgcgttgcgctcctcttgtggcatatcaggaaaacatagctcaagatttctttcggcaactttggcacgttttttcagaaagtgcatagaaaatcggcccagacgagtgcctatccggtaaataatgggataggggagcagcaccagtaagtaaagcagactgataccaaaccaagtaggccaataacggggatgcagtagtgaacgttgaaaagaaggcgcttgtatcatggattctcaggtttttatagttccaacaagatggacaaaacaatttccttattgtgacattttttgacgggatatcgaagttttcaagtatgaaatgtttatgatcttgattttggtgcacttagcttttgtcattggtaaagagtgatagctcgtaatttactgataaataaaaattaaaatagttttacagagctatttacaatttatgtagataatattactgtttatatgaacagtattgtttgtggagggaaaaattatgcatgtaattatgcatgtaattatgcatgtagaagttacgatcgataaatctaaaaaactgccaaaaggtgctgtccctgcgcttgctgtagaactagataaccgtcttaaacgtcgctggcctgatattaaaaccaatgtgaagttggcaagtcatgatgggctgtctgttcgtggtggcactcctgatgacaggaaagctgttgaagagattctacaagagacatgggaaagcgctgatgattggttccagccttgatagagagttacaaatgactactcgttgaaaatcattttcgttatcatataccctatagatttcaagatgcatcgcgacggcaagggagcgaatccctggaagcataggtaactatgtgaccggggtgagcgagtgcagccaacaaagaggcaacttgaaagataacaggtatattacgcttgatagcggaggctatcacttatacatccctattttatgacttgaaattcaggaaagtacaccatgccagtgttacacaaccgcatttctaataaagagctgaaagcacgtatgttggcggagacccaacctcgtacgaccatctctttttacaaatattttaacatcttaaatcctctggattttcgtaacagcttgtatcaacaatttaccgacctctcagtatttggccgggtttatattgctaaagaggggattaatgctcagataagtttaccaactcataatttggaagcattcaaggcgttattgtatagcgttgatcctgcattggataatttgaggctgaatattgcgcttgatgatgatgggaaatctttctgggttttgcgtatgaaagtacgtgatcgtgtagtggctgatgggattgatgatgaaacttttgatccatcaaaaaccggcgagtaccttaaagcagagcaggtcaaccagatgctggataatcctgatacgctatttgtcgatatgcgcaatcactatgaatatgaagttgggcattttgaaaatgcaattgaagttccttctgatacattccgtgaacagttgccaatggttgcggaaatgttgcaggataataaggataaaaatattgtaatgtactgcactggtggtattcgctgtgaaaaagccagtgcttatatgctgcacaatggctttaaaaacgtctatcacgtagagggcggtattatcgaatatgctcgtaaagcgagagaacagggattaccggtacgttttgttggtaaaaactttgtctttgatgagcggatgggagagcgtatttcagacgatgtgattgctcattgccatcaatgtggcgtgtcttgcgacagtcatactaattgtaaaaatgaaggttgccacttgctatttattcagtgtccagagtgtgcaactaaatttgaaggctgttgtagtgaaatgtgcagagaagaagtcaggttaccggaaaccgagcagcgtgctcgccgtgctggtcgtgaaaatggagcaaaaatatttaataaatcccggcaccgtctacaggatgggttgaacagtacttcactacagtctgttgaataacgtgattaatcgctggcacagagatcaatgtgccagttgatttgattaatagagatatttaaatacattgtaaataaagcagagttcaattctattacgcacattgattttttcagtaatgtgtcttttatgagaatagactgtgctattactgatttttaacttttgggatatctggtaattagggatttctttcatccagtaatcgataactttatgctcttgagggctgaaaatagagcaatactggtcgattgttgctctgtgtctctgaatttcttgcaatgtggttttgctaattttattaagcagataggtaagatttctctttgccagaataacagcattatctttcaatgtaatataattgtcacaataaggataggcgctattaaggtatatataaatacgagtgttatctgtaagagttataaatttctgtaaatcggaacagtaactggcatgatgacaataatgtgtcaagttagctaaaacgatatcaggagcaaaatgagttacaatatttatcgcctcattaattgaaggtgagtcaacaatttcaagatcttcgacattatcatttttctttaaaaactctctgatacctgaacgggtataatagcactcttcaacaattaagattttcattattgcacatccctgttcctgtttggccaaactcacaataaacgccccatctatcagtagtcaactcggcaaatttgatggttaagttagcttaatccgaaattattatatagtgatatggtattccagacaaaatctttgagatgaatcgatgcgtctcctaaccggacacccatttatacgggtgtccgggtttaagattattaatgttttgtatggtttagatcgctgtattctgaagattcgatcttttcaattcctgcctggaggatgtatatcaattgctttgcaatgtcagttgtcaaccataaggttcgatctaccatgacatgttctggtgtttgatcttgggaggacaaatagtgaaggcgtagcatcactgcatcatatgtatcgacggtactgacatcccagcctacaacaggatgcgtttgaataacttcatctttactgcccataaaacctcctaatcagatcactgcattatttattaatatcattgactaagagcaaactacctcattcctgaatgagtcattagttagtatatgctttttaatgaaagtaagaaggttttttgttaggaattatgagttggtgtgttggtaactatgtaaattaatggggatgatgaccatccccatgttatatcagtctgttactttcacatcccagcgggcatcttcgccagccaaaaatggaataagtttttcattattgcaatcaatgtgttcaatgacggtagaaggtttgcgagttagttcaataaagccttcattgacaggtagcccgtaaaatttagggccattaagtgaacagaaagcttcaaaatgcggtaatgcattcatctcctcaaacactgttgcataagcaggtagcgctgatggtgcgttaaagacgccggcacaaccacaagaggattctttcttttgttgtgcatgtggtgctgagtctgtacctagaaagaagcgatcacagccactggcgacggctgcccgtaaagcctcttgatgcacattgcgttttagcacaggcagacagtataggtgtggccgaatcccaccaactagcatatggttgcgattgaacatgagatgctgtggagttaatgttgctgccagattgttattgccttccagcacatattgtgcggcttctttggtagttatgtgttcaaacacaactttcagtgctgggaattgattacgtagtggttccatgacttgttcaataaaacgggcttctcgatcgaaaatatcaatatgagaagcagtaacctcaccgtggacgagcagaggcatccccagtttttccatcacggctaatagtggataaatattctttatatcagagacgccgtgacttgaattggttgtggcattggcagggtagagcttgcaagcggtaaaaatgccttctttataaccaatttctatctgagagctttcagtcgtgtcagtaagataacaagtcataagaggctggaaattatctccttcgggaatagctgccagtattctgcctctataagccttggcactgaccacttctgtaatcggcgtaagcagattaggcatgacgatagctcggccaaagtaatgactggtgtagggaacgacagttcttagcatttcaccatcacgaaaatggatgtgccagtcatcagggcggcggatttttattgtgtatgattcagtggtcatgagaaaccggctccagtatatatgataggaatgaagatgctgagttcagcatatccaggccgggaatggatgataaagctaaaatggttgaatagctattaatgaatataagttttagaaaaaaattcagccaaatcaactaggttagggtagtcagaggtggattttcttataacaaaggaaaaatgaaatatgagggtaaaaaataaatgaagttggctcctctgactggactcgaacttcatctgtatctcctattattactgccattgtgaaaataacatgattatttaccaacatatttaccatcattattgttttcttatgataaaaatgtcaattaaaaacaactggttgttgtcataactatctaactaacccgaattctgcttaatccgtcattgaaaaatcgtcttctgagtagaaaactttcagtgatggcttcttcaatttaaggcagtaagcaatcaatccacctaaaacgcacaacagaaagccttttatacttcggtggcgggaatgctctatttgagaaagagtttttaattgcccattaatcgtttcaatgataaaacgcttttttaacattatcttatcccactcagcttgcatactcgctttcatgttacgccgttttttcgtgatgaaagtgacatcggttttagctaaatcgtccgccaattcctggctgaggtaacctttgtcaccgtaaagagaacccgttaattcttttgataattcacgaacaggttcccgatcatccacattacccggagtcactttaagcgcgagaatttcaccctgatgattgacaaccaggtgtaatttgaaaccgtaaaaccagcccattgaattttttccgcgctttgctatccccgcaaagaccttatgtcgagggatgcgaatgttatggcagacactcaaacgggtggaatcaataaaagcaatgcctgtgggtttcccttttaattgagtcagatagctgcataatggcaccaaaacggaaggagccacactgacaaaacgaggatagctaagcaaggttggaaaatccttatggtgatatttccaaatatgttctagataaaaatgtttaaaatcacggtaatgcgacatatgaaaaaggatcaaaatggtcatgatttcactgggatacatatgaccttgtcggcggcgtaaacgatgcccgctatcgagacaaaattgttcccattgagggatgaaaaaacggcaaaaatcatcgacatcacagaaaatttcaactaagttgtccatagcctgttcccccctcggagctgtttttggtgcacaccaaaactttgctcctggaacaggcttctcgtcaatttcttatccagaattcgggttaactatgaacgccatttcttactttctctgtcaatacgatattgctgttatttttctgaaagtaattgatataaaacaattagttattgtttagtaaataaaagatgtttagtcaagatgagattgctcatcttcaaggttacttgtctgtcatcacaccattttgaaaaccttcccctcattttcactttctctatcatgttgaatgggctaacttttatgaaacatgaatgtaatcggcaggacaagaacaatgactactcaaaaggaaatggacgatatcaggacagccttatcttggtttgatgtacgccgatatgatgccctgaaagatcttactttagagcaaatctatgctgaacttgaaagacggatgtttgcttacaaaacaaggcagcaatgggatacagcaggcaaaaataatcaaatgcaagctatataccatgaggcaacaatccgatgcggtgatgtgatacttgaatcgaaatggatttcagataatcagagactctcacatagctatgctgtcagaccaatgaccagaggtgcattgtttaactatggacgggcgatgtatcgactggagacttctgagcaaacagatcctgttgcagtgagttctgactacatctctgagtatctgaaacaaggaggcatgaaccctactaacaagatgctgatcgaaattgacttggaacaagccagcagtgacgatctcgcagaacacctgaaagtgctgattgctctatggcaaaagcaccttaaaacggcaaaaccacctaaacgatcttttcgttttggtcataagacctttcaaagaatacttgattacaaagtcatccctttaatggatttgatctcatgggaacagacctacaacgaaggtaagaacataccgttcaacattttagctgacatcctgcatggtactggcggggttcggagccgtgatcacatcaaagatactgattatgattacgcgaaaagctatctcgataaggatgagtatttcaaggttttgaatgatttctatataaaaaacatcctgttaaaggactggaagatcactgaagtcataaaaatcaacgataaagccccctgataaagacaaaaagtaaacacaagggatgttcactatctgtgagtatccctataactacttcccctctaccagtttccgcgaagttcgggatttgcgaacgtccctagtttagaaccagccaaaatcctagaattatctccatcgaacaacacaggagataaacatggtccaaatcaaaacagacaaacatcagaaacttattcgtttgcccgaagtaatcagaagaacggggtttggtaaaacgtggatatatacccttataagagcgggtaaatttcctaaacaagttaaaaccggattgcgttctatagcatttattgaaagtgagattgatgcatggatcgaaaaggttattcaggcatcacgtactcaagcagtttaatagatactgttaatataataatataaggaggttttatgtaaaatctgaaaaaagaagtttgctattaacgacattccttaccgaaataaaataatacaggttttctgtagggatattttcactcaaattatagaaggaaatgaatatgaatatgaatatgaataatacaataactgaaactcatgtgataacagtcaccaatgaatcaaccagactgtttattgttaaagcatttgaaggttatgagctttatatcaataatatgcaggaatacatggggagccgattctttaaaaatattgcggacatgaaatatatggatgatgtttttgataaagtaatagaaaacagtaaggagggatttagtcagttcctgaaaaaaaacaaaagcgcaggatctctaaaagaggtgtttttcgatgaggtcaaagtcaatctgaggtttatgcataatgtgatgttaaactcagactaatagttctgttatctctatttggccccgcaaggggctaatagcaacgaaagagaatataaatctgtatctaaccatgaggatataaatatgaataaagaacttaagaccgaatcgaatagatgttttttccatttgatgacgatattttatgatctaagaatgcgcactgccatgaacgagcgtcctgatgagattgaagcactatgtaatgatgaagctttcatgggagttgtttttaaagaatgtatcaaaaaagctaaatcacatttaccattggtcgagcggcatcaccccggcgctgaaggtgtatcagtaaaactggttgatcttgcttatgtgatggaaaggctgaaagcatatcatcaggataaaggttttatgaaagagtctcaaaagtagtctggtttatttaggccctgtcattgggccgaataaaaataaagtcttggattcacataataagtgcaacatcgttaatctggaagtaaacatgttcgtattcctttaaataattcattcggtgttttcccaccccgtgtttttcgaggacgattatttaatcggtttaccacaaaatttatttcctgatcagagatttcattaaaattggttccctttggaaagtattgtctgattaacccattgatattctcattgatccctctttcccaaggcgaataagggtgagcaaagtaaatttgggtttctaattcttcaccgatgatttcatgatctgcgaactccaaaccgttatcgaacgtgatggtcttaaccttttgttttaacgggtataatactttcactgctgctttcgcgacttctgatgcctgcttgctatcaagtttaacgataattgtatacagcgtcttgcggtcaaccaatgttaataagacactttttttatctttccctattatcgtatctccttcccagtccccaatacgttcttttttatcaacaatttccgggcgttcatcaatactgacccgatttttaattttacctcttctttcatagcgaccatagcgtttgcgatagggttttctggctattcgcagatgttgccataaatcacccccctctcttttatcttgataaatcagtctataaatcgtctcatgatgcaaagatatccctttatgttgcttcaaataatcagccacctgttcagggcttaaatctttccaaattaaccgttttatccatctttttacttccggcgttattttcacggcctttttagcaaaatgacgacgcgccaataccttcaaatgagcctgttcagggcagtatgtctggacttcttgatttctcttcaattctctgctgatggtcgatgggcttcgcttaagtgacttcgcaataaaaagctgtgaaaaacccgcttctcttaaactggaaatctggtatctttctgtttcggtcagttgtgtataggccatagtgcattttcctttggcgagaaagatgcctactatagcaactgaccgcccttctgaaaaattgcacttattagtcgaatccgccagttaaatatatatcattttaatatgaggagttgtcatgtcaaaaaacattgaaattgaaaatacatctacagagttattttatgatcttgctaaacgttcatttgaagcaagctgggaagttatgcaggatatgtgtagtgatagcatttcgcatcttgtcgatgatgctgattttatgagtgcatttatacggctcatgattaatcatatttgtcataactttgacaagtttactacgcaggaaggtaatcaaggaaatattgatgaggttaactacgaggaaatagcagaacgacttgtacgtaatgatagtgctgctggcctttattgcggtacgaatacaccagctgcgttttatgggtctgaacaaagaagaggcagagaaagagagctgtgagacagtattaagccccctggcgtggaaattactgtggtcaaaacaagaaaaacgccgtgtgccgaaaaaagccccgagtttgcattgggccttcatcaatctgggaaaactggccggctggtacgattccaaacgcacgggtcgagtcggatgggaacgactttgggaaggctggtttcggctgcaaaccctgatagacggctatttgctggctaaatcaattgatttggagatctgatcaagagacagctcgtagaacagggcttaatggcctttgttaaaggctgggataacaatacgcttgggataacagatgaaggtaaactagccaaaatctgggatgccaaagaaggtgtttgtattggtcgccgggttgttgatgaagtgaaggaatggactgagccgggtaatggtaatcagaaagttgtccgcgtcacctatacatggaaattaactgatgttccatcatgggtggacaaaagcgcgttctctggtgtgaaagggatgaatgaacctgctgatggtgccatgaatcttgttaaaaccagcaatggttggaaagcgaactaaggggctatcatggaaaacaataccatcaagtgtcctttctgcctgcgagaaagccagcgaggtgtgcatgtttgtaccggttgtatggcgactgttttatatggagccttccccggctggtatgctgccgtagctatcttactgtcctttggcctgtctatactgattggaatgtctacaggtacggcgggggctactatcagcctgccaataatttttattgtagcttttatagaaggtaaggcgatcttctctgataatgttgtgttcaggcgaagaatgtaatttttaggggctggtcaataatatgtcctgccccagaatcttacacatttggcactgaagataggattgttattatctccttaatggttgtatcaagctgttccatgaaatgtttttttaggggcggcattcgaggtatttctttcgagattttattttgtaactcaatccaaaacccctcttcaactttcagatagttacatgcttttagaccgttaagtgtatctcctgatgtataacgttcttttatgatataagtgaagtaagatgttatatgattgcttgattgtaataagcattttactaagtctttagcatttaatttattgaaaaatggcttaaactgattttcagtatataaaatattgatcagctcatccttgtttccttgcgcaaggtatgtaaatatttcatttgctctgatgatttctgcttggtattttaatttgtcagagatagatttacgttcagacttgagtaaattaaatagttttctaaagtcttcatctgaatcattgtagtagctatagccagtattgtttccaaatactatatcttcaatagagtgattgtccaaaatagcccagtgatctttataggttttaatgtatttataaactgtatcatttatttcatcgatttccttactaattagagcgttttttgagaagtaaataattaaggctaatttatgtaagtaaacctgatgctcttcctcctgaagagagtcgaactccaaaagaagctgattggtaagagagataaactgctcctcattaagtgtgttaaaattccataatttgaaccagaggggatgctcattgttttttggttgtttaaaatatacaagttcatcagtggctgactttaaattacttgcatcacctttgaacaaaatatcagcccataaatcaccggtatacaagtttctataactaatgtcatatttatgaaatacattcttagaaccatcgctattggctttttcacattggaatggctcattatgtcttaatttttcctcgcttagctcaccacttttcatttctaatgataaagcaaagaaaacacgaatcaacagcgatgaatactcttcatttttgagttgttcttcatcgatataatttgcaatgtatccaaaatctaaaatactttgcttgagttttctgagatttgtatcctctgagcgtatataaatatttttaatgacatctctatgtctttttaatgactcacattttgattgatcaaggaaacctttcaaaaccctatcaatattatgcttgatttgaaatgtcttaccgataactttttctttaaattttgaataaacatccttagttttatcctcgtgtgatttatccttttcatatagaattttttcgttagctatgagaatgactttaacctttgaaatttcgacaaggtaattaacatatcccagaatttcctttaacgggatatcagtacgctcaagatcatctaaagctatgatgatctctccgctatccgtattagtagagaatatgtcgctgaattttattttatctaaacttgcattaatatctatatctggtttgctatcgccgtttatatctatcttacaaccgagttttaatgctccctttagaatattaccagctaacttagtatatctgtggcctaatagtgggtgtaatgattgaaaaatcatttcatcaatactggatgtggttttaaatccgaataaacttatttttattattttatttccagactgattatcaacggcgttttcattatattcctttataaaactttctataaaatgggtttttcccgctccccacccgccagtaatcatgaaagcatactctggagcacttgtatttaaataataatttagattgtcaattatatgtttattaagttccattttttacaaaccattcactgttgagtaatttttatattttatatcaaaaatgtttgattgtcatttgttcttaatgatattagagcttgatggcttgagtttaagaaagtttacccccttaattagttcgagtggtaatgaaggtgacgtcccattatcgtaatcactaacggatttaacgctattaatacgacttgggaaacggctgatctcatccggtgttggcttatagtcatcgtggttaaacttagcttgtttctcatattcactacgtgaaacacgacggcctaatacctcatcaaagacatagttttcagcaatacgtttatcatgttcttcactgataatatcaactttagttttgttcgttttagcccatataaatttatctctgataaaatcaactaaaagagcagtgaagcgtttaaagatattatcctgacgtggagtagcctgtatccttttaacatgttcaggggcgattctggatggcctttttggggttttagaagaggttgttttcagaagagtatttgttccagagtcagaaatacttacatatggcttcttagcagcaacgaccttactgatttttgttttatcacggtaagatttaacacctctggctcttgtatgaggagccggagcgaccagaacaggtttcagttcttcagcgttcaatgaacaggtacgggattcaggtaatacaatttcttctggttcagcaagaacagctacagtaaagcttctgacgtcaacgacgatttcaagatcaagttcactgaatgttttgtagacttcaacggcttcttgcttggcagcatcacgaacagcctgttctgcggctctttgttcctgagctgctttactacgccatttagcactgtggatacgcttcatagaagggcggtttgtttcggcggatttagcaagccacagcgctttttcttcattatctaaagctactgctgctttttccaatgcttcctcgtgctgggcctgaagggaacgatgatcaatacgttctgatgaaccagcagcagcaaggaagctgttcgccatcgatgcccatgattcacgccacaacacagacatttttctgtcgttccagcttctttcttttttaccaaaaccttccgggccaatggtttttaatgtcaacataacgtgagcgtgggggttatcactatcaagatcatggaaagcgatatcagcaatcatgcttttatcaacgaaatttttctgacaatactcaaggacaagttttttcttatcatcattgtttaactcggtaggaatagcaacatcgaaataacgagctgtttgtccgttattttgacgttcaactctttcaacttcattccacaatgccgtggagtcctttacgatatgttgaggagcattaacgggggctaatatgaaatgcccgcataaatcagtacggcggctataatcataggtatcacctgttctttcatctgtgattctgcaacgggcatgataggcagctttagcaacggaagacttgccttcagagcgtttcacaattttaaaatcaagatgaaaaatagccatgcaatataaacaacctcatataaatttaaatatcaaaccaaaatataaatctccaatgcgactatgcaggttttagtttttcgtaagaaaaactctggtgttgacgttgaccttgcttttagcctgcggcaggcaaccgtcggtagaccccacacgctcacgaagtgagtgtataggtgggcattgctttatttttatatctcctaaagaagctaaaaataacgacaatgtaaaaagtttttctatgcttaaataataacgctagttttaatgtctgtgaaattaatagggtaggaatcggacgaacggcagaggtagcgtagttatattgggtctctgagagcgcccgcgagggcaaaagtagtgttttctttcccgccgtaaggcgggaaagcgtaaatcagatgaaatagtgaaaataactgatacttttatgtgctgcacaattcacaggttaaagtcagaaaacagaatataaaaacaatagatgaaattgttttcattaatttgataaaataagtaacgcggagagtatcagacattcaatgttagtggttgcactcgtttgtgttgcataattttattttgagcttactgatatctcatttttaaaaccaaaacaccattatttcgggataaatcccatcattaacagggtaagcctgtcagcaggtgattgtttaaaacaatcttacagagctgcttcattatttataacacatcattgtcatattatttgaccttttcattttttaattgtattgcaatgagtaatcattgaacaacaaaaggaaaaataaatgacatataaatacattaacttcatggggctggatttcaataagatagcggagatgaaaaaatcgttcactggatttgaaaaacgaatacaaatcaacaatgatgactttgacgatgagctattctatttttgttgctttatggattactttcttgaacgccatgacagcgtatctttccctgcttattataaattttgcgtgtctctggatgcttacctgtattcactcatgtatctcggagaaaacatctcaatgatgaacttaatcggtttctttcccggcaaactgttctggcataccgttgataatggaaatgatgatgttttttgtatacttctttcattttacatgaatgaatggaaaaaagggaagaattctgatgagtaaacagggagatattaaaagcagaaaaccacgaatagaaaaaacaattaaacaaaaaatagcttcggcacagatgcatctgaatcgacttaagagcaaagaaaaatctctgaccaagagtgctgaaacacgtctgaagattattttaggggcagaagtggctaaagctgttggctgtaaagtagaagatgtcgataaggagtttgtattgggaatgttattacaggcttcgaatattaatgtggaggctaaagcaagaattaagttacgaggaaaaagatttcctgaggatatggtgggaaggcaggaataatatactcataaaagcgatgtgggataaatattttttgatcctccagatttttatgggggattaaatttatccagagtaagcgattatgataatcttttatttaaatagataaatatatttgacaattgatatttaatgttataattagtaagtgttccttgagaacattcacttcaacgaagtgtctgattgccccatatatggggagtggtttacagcccaatgggctgattgagttgccccaagtgtgggggtatgtattctgcccaatgggtagttcccttaaagggaaaacaaagggccgtatggcccttttgcttgtgtatttgtctaattaatcacaacttacttcacttagttctttggctatgaacataaactctgcacgatgatttttatctttagatatgtatatctttccgtctacatcagcaataatgaatagttttatcttgcttttgtctttctgtattataactaacctttcaggtatggagtatttcaccagatccttttcgtgataacattgattaacataacctaacccgatcatattcgctattttttctgatacacctgttgaaaatgctgttgcaatataaaaaacaataagcaaggagaaaaaaacgtaacaccatatcctattcttttgatctcgattacgttgatgtatgtctgctaatccaataatcgccaatgtaacgataataacaaatattgaaagagcttgaataatactaataaaagaaaaatttgtttctatatcaaagttcagtgtaatggaaagaaacccaaacatagcaatgcttattgctaataataataccgtatataaaaataactttaatgtgacggctattttcttataatgaaagggttttgttatcgctaaaaaatgaagagtaagtacaattataacaactaatgaaactccgacataaaaatggtaaaatgcgaatgaagaagctactccacatgatgtgaagtataataaatatattaattttcttctttttatcccctttatcttttctttgactaatatatcataatagaggcatcgggcaattgctggagataagttgaatgatattaaaaaacatccaacaataaaaagtattataaaaaaagataatgcacctgtactgatgagtaaatttgattgtatcagatcaataaacttcacaccgtgggtgcgtgcatagctaaagaggaaccatgctcctgaaaacgtacacataaaaattattagagttatgattttttctatgttttttaatcccaagatggattgttgttttattttgtttaacactttgttatccttttcatgggttttatctggcagagatcttttccccgattgacagttaaactatgctttgaagaaacaattgtagcagtggtgtttctttaatgacaatatcacctttcaccgtcaaaatacttctttcgattaatggtcgtagaacctcaaggattatatgccttctaaaaataagatggcgatgaggtaattgaatggttttcttattggcaattgcttctgcttctaaagatataaattcaggatcgagaggtaggatgtcactcatttcatcaaatatgttataaactgtaatgctgcttccagttgatacattatctattatattaagcatgatgcttattactaaaattgaccatctctggaacatccaaaggctgggtgattctttcatttctttgagcattttaggtaattttggccacttcctctgtatgcttggtgtaaatagatcattgcttataagccatttactccatgtgttatagtctctattgaagagttcatctgtcatgtctaaatactcatatgagcgattttttaatctattgctcatataaattgttagggattttatatgtatattttctttacaggttttaataaattgagaccgtactcgtgatttttctttttcaatagacggatgtttcaaccagcgccattgcggtttgttactatcttcaggatagaatctaataattacacttccatcaaattcatccattagattcaaattaaaataacttagtaaatatattatccatatatgaaattctttccctttatgcaagatgtctccacgcacgataaaaccaccatcggttttttgtataagcgatagcttatcaacggtacgattcctctttgcgtacagacagaagttttcagtaaaaacctcattagattcttcataagatatactgtcgtgaatacttggcaggaatacggttttatttttcatggttttatttattgaatttattgtgttttttaatcttcttgagcgcctctcatttatttctttttcgacagctaactcatgacattcaatcgctttaatactctcagagtaataaaaccattcattggggacttgattgtttttaatacgttgatgccattcttctatctcgatatcttcagagtattcgaacactaactctactgaatttattttgttatttttaaagtaacgtaccttttcaggttcgcatttatgtgttacgcagatctccacgatgtataatccaatgtctgtgttaaggcagacatctgatacatagtttccaattcggtgttctaaagttgcggataaaattttggtttttattagtggtgtttttagcgtgtggttcttatacgcaaaagtcaattgaggtattgttaatacatctaagcgaaggaaaaaatgttgcattgctaaatgcagctgtgtcattcggcaagcacgattctcaataaggtttctatgagcgaaatgatgtttttttaattttcctccattgcgagctattaattcatcattgcatgacttacatatgcaattacacttagccccgttaggaacatcatcaatatgcatgatctgttttgtttctttttccacagcatattcaatgatcaacacaaactccatttctttactatgactgacatgtctagattaaatccttgtattgtgtatgtctactgcataaggcaacgcgatccttagctttcaggtcgttacttgctgcgagcaaacttagatagcctgaccatgtcattaatattggcacctaaatagctgcgcgggatagcaatccatttagagcgtaaggcattggtgctgttttctctgtctaccacgctgtatcaggtctacgatgtatgcctttacgcaacatgttacatgccagtcagcgtaagtgtagcggtattagatacagctatttagataacaagtccaccactgcaacatcaggaggtgctgatcaagatgtttgcctaagagtgtaagtaatgtgaacgctgttgtcttacttattgcatatctgaatgatttttacttttcatataactatattgcataatgaattacctattgacctgtcaatgcaaccatataaccatcaatattgatccctgatagtcatcatcattgtctttatcactcgattaccgacacgagcatgagatgctggtagcatatgttgaaaaaaatgctggctctgtttatctgcaacgctctgtgctgtgatagctctacttcagagcgggctaagaccacgattttatagactttttgcccttcctaaattagattggttagaaaagtcagtagcgattcattaagtaagggtggggttttcaatggaacgtaatgttttgggtcatgctcaaagagaaatttcaggagcaaccacattcggaaaatatgattttcaatatcattgggccttatgcagaataattgaaaagcataaatcaaattctgactatgcattattaatcgaatatcatgaggatgtcgttatcgcagactcattgtatggaagttcggcaaaatttgaattttttcaagtaaagaatactggaaaacctttcacttctgacgccttaaccaaacgagagcaaggtgctgagggagctaagagttccattctaggtaagctattaagctcatgtattggtacagactatgaagcacgcattacggaaatcggtcttgtgtcctcaagtggtttctcatttgaacaaagagataagaagttaaaattagacattataacttcaggtgatcttagtgtagattgcttatcggggttaactgaaaaattaaaggatgagcttggaatagctctcttgccagaaaatctaaaattcattgttccaaaaataaaattagagaaccaagaagagtttgtcattggtagatttgctgaattagtaaatgaaatatttccaaatagtcattgtaatgccgttaatatttatagagcaataatcgatgaaattcatcgcaaaggacagaatacttacgattttactgtttgggagaaaatggtagaggataaatctctcacatctcataaggtaaaggatgttatagctgttaacacaacaagcccaaaatttgaagactttgagaaagactttgagtacttagctaaaaatgatatgaaatggaacaccttaacttatcggaagattaataaaaaaataaaacaacttttcttgcgccgaatcggacatttgtcggcttttgatatgaatataatgagaatagtccagcaggcgctaagtagtgtcccagaagaagactttacagaaacccgtgattacattgagtcagttattgtaaaagctcaagaacttaatattgaagatcaagtaccagaacatgacgatatattatgcgagatagtttatagctttttaaaggtgatgcatgaataatattggaagtaataaagaaaactataaattattaattcggaatttaaggaacaagaaaaatgagaagcttgaaatttcaacgattagttctgatatcagattcgaaaagacttgcgaatcagttctcgttccagaaaagattgaatttaattaccggaaaagataacagtattggcaagtccactctagcaaaaagtttactgtggtctttaggatgcgatcctgttttcgatgaagaatggaaatcaaatgacattaaatctattttatattttactttaaataacaaagagtatttttcatgtcgaggaagtcactcaataattttgggagctatcggtgatgaagctcaaagatatataaatataactggtgatttttcgaaaggcttctcggatctcgtcaatttcaaaatgaagcttcctaatcgtggtgatggaaacttggagacacctcctccagcatattattttttaccattctatattgaccagataaaaagctggagttcaccttggaattcattcgagaacttagggcaatattccaactggaaaggtccattaatcaaatactttactggttatcttaagcctgagcattttgatattgaggaaaacatttatgaatatagtgaaatcaaaaaagaatcagcacataaaatagaaaaatttcaaagcgccgttgaagttatagttgataacacggttgattcccctataactttagataataatgacttcattaagattcagaatgaaataaaaaatgaactttacgacttgattgattaccaaacaagactttatgatgctcaggctacgatcacttcaaatatttatgatctcgaaagtcagtatgcgttagccattacttctgcaaacgaactcgaggcagattataaatttgcggtagaatccatacctactgattatttagagtgtccattgtgtgggactcttcacgataactcactacctaacagagcgttgcttctttcagaaaaggactcattgcttaatgaggcaaattcaatagcatctaaaatagtggaactcaaatcttcattgaactcattaaatgaggacgctcagtttattactaacgaaatcgaaagaataaataataaatacattacagacgacgatgcggttaaaaaaggtctcattgctcaagtaatcgatactctatctactgaaaacgtctcaaaaaatattcaaattaaaatcgataatgaagaccttaacatcagcaaggccaacagttccatcaaggaattaaaaaaggaccagaaaaaacttctttctaccaaagaaaaggaagaattgaactcgtcctttatgtcaaaactgctggcaaatattgaagcactgggttcgacaggaataaaccttagcaaagttaaatcacccactgattacaaacagttgcttggtggtggtgctgctgaggctgctagaggattacttgcttatcaactctctgtactgcaacaaattcatggtgctaaaacttgcgtagtgcctcctttcgtcatcgatacgcccaaccagcaggaacaggcgggataccgttatgaaactgtcattaaagaattaatgcgtagcgttcctcaggattatcagataatactgtgtgcaatggagaatgatgcattaaatgaatttaaacatgatgctaatgttattgtgttaaattcaaatagacttctaactgcttcacaatacgattctttgaggtctgaatataaatctattcaggcaatagttacagatcaaagtgataaggaataaataaggttagctactcaatcttcattttagataatacaaaatagaggtaaagtatgatggaaggccatccttggcctctatttctatcttctttgagtaaactcaaatggcctgaccataccgttatggtttgcatcaaggaaatcagcccaccattggagcatcaggcggcgctgttcgaggtgttttgccttgtgggtataagcagcacggacgctgttgctttccttatggctcatttgaagctccacagcgtcttctgaccacaaacctgactcaattaaggcactacaggccagcgtgcgaaaaccgtgtccacagatgtcctgcttcgtgtcatagcccatattgcgaagggctttgttgatggtgttttcgctcatgggcttaaacgagtcataacagccagtaaagattaatccatcatcatggccttctttataagtcagttgtcggatctctttcagtatcctcatggcttgcttacacaagggaacgaaatgcttacgcttcattttggccccacgagtggaatgtttgacgttttcaatcgcttcccgctgttcggggatcacccacaacttacttttgaaatcaatttcagaccaacgggcgaaacgaagttcactggaacgaatgaaaatcatcagattgagctgaatagccagtatggttaacctgcgacctctgtattcggcaatttttttcagtagttgagggatttcttccagctccagtgccgggcggtgttcagtctgtggtttctgaacagcaccttccatatcataggcggggttatggagtatcagtttttgctgtacggcatgacgcaggatcgctgtaatgtattgttgaatgcgcatggcaacttcaagataaccaagtgcctcaacctttttcacaggaaccagcagatcgcctgtatccagctcggcaacatctttgtctccaatcgccgggaagacataggtttcaaggcgcttccatacggaatcaccataatcttttgaccattttgtttttgtggcaaaccaagccttagccaccatagcgaagcaacgtgtcttatcacgcttggcctttagctctttaacctctgcctgtagggtcaataccctgagcaagaagccttctggcctcatcacggcgttgtcttgcatcagcaagtgaaacagcagggtaaacacctatagagaggattttttgcttcccttcgaagcggtaagccatttgccagtatttggaacccttcggggtaacgcgaaggaacataccaaagccatcagttaacttgtattccttctcgaggggttttgcattttttgctttaatatcagtcagtgacatgaaaacacccctcgattgttggtaaaaggcaaatcgaaccagcattaccagcatttttaccatcaaaatgatatggcttcgagaggtttttagtgaacgagggtgaacgactgaagggggataaccaattgatagaaatgcagaaagcagacgtcagtgaacgtctgcttcccttaaattggctcccccaactggacttgaaccagtgacatacggattaacagtccgctgttctaccgactgaactatggaggaactccttcacaacggggcgtatactagtgatatgctttggctttgtcaaagtagaaaacaataaaaaaagtttgtttgcgggcaaaatgcacttgttgttatatttttatgctaatcacttgagatttgatggaattttattccactaacgtaagttgaatagaactaccgtgcttatgttgtgagtaaatagttgggagaattaagtagagaagtcagaatagcaaaaatcccgcattaagcgggattttcataatttggctcctccaactggacttgaaccagtgacatacggattaacagtccgccgttctaccgactgaactatggaggaactccttcacaacggggtgcatattaacgatatgcttttgctttgtcaaagcagaaaataacaaaaacgatctgtttgctgtcaaactgaacttgttgatctatttttatgccgaataaggcttatttgttggagatgtatgctatatacccgtcatctttcaagttgcctctttgttggcggcacttgctcacctcggtcacatcgttacctatgctcccgggattcactcccttgccgtcgcgatccatcttgaaatccatagggtatggaaggaaacgggttgattggaattgttatattatgttgtaagcaattggtggaattaggaatgcaaaaagcccgcacttggcgggcgggcttcttatgaatttggctcctccaactggacttgaaccagtgacatacggattaacagtccgccgttctaccgactgaactatggaggaattgtccttgacaacgaggcgaataatatctgggtattttgggcttgtcaaaggggaaaattaaaaattgagtttgattggttaactgatgttcaataatgatattttttaccattttttgatcaattaaattttcagctcaaggaatgcgagagttaactgatatttatccatgataattagatggtgaaaatatcatctatatttttatttaggaaataattaatcatgagcattaaaaatataattaaatatatattagataattttatttttgtgttatttatgatatttttatatttcatggtaattttcctattttatctgttttaatagatcacttattgtattttgatatttattagcggatttactcgtctataattattaactgaaaaagtaatttgttatttgatctctgatttggcaaacatgatgttaattcacgccaaaacgaatggtaaagagtttgccattaataatgaaatctcattttctgctagtatactaagatattctcgatctaataatatgtttgtataggcatataaaatgcaataaagtgaataataactatttcaggaagtattttaaattaaataattggtaaggaggtgaaaataattttaaatataaaataagtaaataatatttccccgaaaagagtggctaattttctggtgatttttatagaatagatgaggagaagtcatgaagtttttaattaatactgatgtaactaactgggtttcacataaagactggtttaacgttccattacgattgtttgtagttctacaagatgatgatggttctgcatcattagaaaattacaaaagtaaaatcgtggtgaatggcttgaatgagggcgaatatgaaatcgtaaataacaataacatatttgatcccattagtagagcatctgaaatattagtaaaaatcaagacagatcagagggttaatgctacaatcggttttgatgctgaagtaacggatgcgagtggtggtgtggtagcgaaagccgctctgagtcgatttaaactaaagtcagtaggattggcagcacctgtatatccggcacattatgataatgttattagcggtgatgatataaaagcaggagttagagtactttttactgattccaatattttagataaatatgaactgaaatttgtttttgataatgataatgttgaagttgttcctggtgtacaaaatagcggtgatattcgtagtttgccggtgaaaaatgatcttcttactgaaggcaagcatgatagcctttattatactattagcgaaagcggtactgctagattttctgctattcaacgtgtacttgtagagcttgataaagattctgcaacagtccaggtgcgtcgtgatttagaagtgccttatattgaagagtatgatgaaaataggggtcgaccgattggtgagagtattattgattatgatatcaatattttggtcaacgatgtaaaacttaaagataaggagttgaaaaaaggtacagtacatataagagggtattctgctgacaatcgagatacaggggaattagtattaaagatagattctttacaaggtagtgaagataatatcttccggttagctgtaattaagcctgaagaaaatgctgatggtcaaccgggtggagttgatttctttaattatataggtaatggtcaggtaaaaattcactacgaaatatcatttgttggtgaagtgaatgtattgcataaatctaaagagaaggtttataaggtagttctggactgattattttggtgctggcaaatgtgctgttgcttacatagaaaaaagcccaataagaattgggcttttctgcatgctagccatatttttgtatactggttatttcatgcgtcctagagattctctttagcatctccaggcttgaatttggctcctccaactggacttgaaccagtgacatacggattaacagtccgccgttctaccgactgaactatggaggaatcgttcttgagaacggggcgaatattagcgatcaattgaaaagctgtcaacgcaaaaaagcttactagtttgttatttgcttgccatatgagcgcattgtcttataactatgctattttactgaaattgagtacttttgttcattatcggctatgcatcatcggtaacgatgttgctatatgtgattgttcaggaaatgccatgatataaacatcataaaaatgaatttcacctttcatttgtataatgcgcttgatttcatcttttattgtcaatggaacatgagggtgggaacaaagctctttgattgcacagtctgagattttttcgctgacgaaccattcgccgttgtaacatacccgtagatcaagtacgccgatatcatcaaaccgatacacaggtttgatttcgagtaataaaaccgccgacataataatgaagagtactgtaaaagctagcagtgaaagtaaactaaaatagggggcgtaccagataagtgcagcgagaaacagataggatacaagcatagccaggcagagataaggatggttactgatgaattggctgttaaaacggggtttaccatcacgttgttcttcgatgttgattcgttcaagatcctgaatcagtatctgtttaatgatattcatatattgacctgattaagcaaaggaaaagtgaaatattttcataaatatattgttcttaaggttagcatgggggaggtaatcttacgtagatcagttgttttattttaatcagccaattgttattgactaagattaactctaatgctttcattaagataaaggttgaataaatcaaaaaaatttataactaatggcattgtttgttaattattgctttaataatgagcataaatatttttttaaaacacctatgcataaaaaggttgctattccttttctatcatgagttaatgcagccggcctgatcaacatacctactttatgtacgacatctggagttaatgagttatgtcgtgagtgttatccccagatagcctttgctgacgcgtttccttcttagtgcctccataagtaatagctgatataactggccaatacatgcccaatggtggcaaaatttttttgatatataggaaagtcacaatgtctgacaaaatgaaaggtcaagtgaagtggttcaacgagtctaaaggcttcggtttcatcaccccagctgacggtagcaaagacgtattcgttcacttctctgccattcagggtaacggtttcaaaactttggcagaaggccagaacgtagaattcaccattgaaaatggtgcgaaaggtccagctgcagcaaacgtaatggctatctgattgcttggatgattttgaagcccgtcactattttctataatgacgggctttttctttgctaaagccatatctttctttacttattagttactcctgattatacttcgtacaaattttattggagagatagtcattggatagtcaaagttttcagttaaatagacaataaaacggcaagctatttatttccttccgatctgctgcttgccaaataaagcgggcagtaccactcaaaatatctgagctgtacttactcaaagaatggtgttatccgatacttagagcctattgagataggcagttagtcaagtagtcgggatagtatattgggttcttattatgatgttatagatcaccgctttgttacctcctggtatagacagaaaatagggctgaattaaacattcagcatacgtttctgtgtgcaaaataaatgcacatgattatttatccatttggttgtatggagaatgtcatgttaataactccttttgtctttcatttattatcggctatgtgctttggtgcattaattggtgctgagcgccaatggcgtcaacgtatggcaggtttaagaaccaatgcattagttgcgactggtgcagcagtttttatccttagttcaataacaacttcacccgatagtgcgggtcgtattgctgcacaagttgtttcaggcattggtttccttggtgcgggtgtcattatgcgggaaggtatgaacattcgtggattaaataccgcagcaaccttatggtgttctgctggaattggtgtgctgtgtggccttggccaatattggctagctgcgatagcaactgccattattctttgcgcaaatatattgttacgtgaagcagctcaacgtattaatttacaacccaggcagcaggccattgatcaagtacagtgttataaaattcacgtagtgtgtgacagtgatgacgaaattctggtgagaacgttagtattacaggcgctcaatggagtagcagtgaggttaaaatcattgagtttcgctgataaagttcaacctggaaaatttgaagtgtgcgttgaagtgttagcaacactggatgagcaaaaagagatagaagcaattgtttgtcgtataagtctggaaaagagcgttagctcaataaactggaaaatggcttctgaactaccgatctgaaaatcttttgtgtaaaacagcaatcactagtttgataaggaatcaccattgacgaatggtgtttcgtcataagaaacaaacaaaacgttgcctatggtgtgtttcctcggttaggcaacgttaattaagcagttatttagcactatttttccgaataattaaggtgaatatttcgcctgtaacgcttttattgatatgttggtgattctggcaaggggataaattataaacaaagcggtgaagcttgtgattagaacggtggtaacagtactgtgttgtagttttgcagatcttggtactaagaatgactgatcgaatatcttgtaccaagagagaggatgttcttgctgctatacctgttatctttcaagttgcctctttgttggctgtactcactcacccctggtcacatagttcgctatgctcccttgccgtcgcgatgcatctttgaaatccataggtatatttgaggcagatatgcgaaatggtactggtcaaatagttactgttgttacaattaaatctatagttgatgtagatttcatctgacatttagtcgtaaaccaagttgattacaaatttgctttatgctagcaatagtttcggatggtattgttgattaatagcttctctaggtaaaagtcgttcaatgcggtatttttagccttggttttgtcactggattgactgttgaacattgctattctcatatcagaatttagtcgtggtaaacctgatatcggtatcatacgcgggtacagaaaaattgatgagttgatatttaatttggttctccatcagccgctcattattgctcagaattttcagtgaaaatatcaattattttcaaagggtaagtagaagaagtgatctaagtttgttcttatataagagtaaaatagataataattctgcttgatggagaatgtcgtgaaaaaataatggaagtagctgatggttaccatcagacaagatcttagagtattaatttaacagttcgatatttatccgatgataaagtaaaaacgtttgtcatctttatggtgatgaaagcgtgatgatattacaggagttgctaactttccttgatcccgtggaggggagtgtggtccctgttatttctgtattaagaaagagtaacacagcagcaggagttcttaccgaggataattctgctattactgtcaggatttgccatgatgtagggttagaattcaaagttattttagcattctaacaaacagagttgatggtgactgaaatcttgagaaatgaaatcagattggtatttagcaaactgtgcatcgtaaaaatcttgtattgcaaaagaatgggcatacagttggtttcttgatgataacattaatggtgctgtggtattgagatacgctagtgtaggcgtttttgctagtaaaggtacagatagtgcaaaaaaagcgatagatattactaggcttgataagaatttaggggtgtcaaatgaagggccgttaagagaagagaggcgagtggaagtattatcaagtgcttgaatataacggcaagtttgaactttgcaatgttttttcaatgttgattaccagagcctttattccattctttttggcgcaaaatattcatttactagtacaagatctgatgtgtgatatttcttggttttttacattgagataaaatggattaaacagttcctgagaagatcattataaatgaggtatcaaaaatgttgaatattctgtggtactggcagagctagtttacttcattttgattttatagatatatatgttgatattgataattttttagtgaaaaatttcgttcgtcaggttttattttagccagattagtgtattgaattgttattttttcagatatcttttgcttatatattgtgcttatatattgtgcatataaaggatgtgttttatccaaaaaacagatacatttccagtgttattgattacataattgataatgattctcgatagccatattctcttcttgtttgatgaactattgggtttagtgtcttcgttctgagagtgtttctgtgattaggttaggttgtaatcggttgttgcattaactgtcatgtttgatgaagagttataattacttggaaaattatcactattatttatatgggaaagtaaatttcttatcaaaaccctatttttttcatcttttttatggatatcaggatatttatatcaccaatgattattaatttcattattctggtgggaaatgatattgatttttatctctatttctattaattatttatacggtaaatctcaattaattattttgttcctgtagagttaattattttatctattcttatcatttaagaaaatgacgttaatgatatatattaatgacatcattagctatgttttttatacgtataaataatgtttttgggatgataatcgtaaatatcacatgaaataatgaaaaatggaaaaaatgacttttaatatttcacttgatttgtatcataagaatatgaattcggaaatatcgtgtattttttatttaaatattaatgtgtgtattattcattttttatattatataaagggtggtaatttaatttatgatagatatttaatagggttatatatttatgtagtttgggaattttatttctggaattgtatctcttatagaactttaaatgtagattgtgaggataataaatcatatttaattagtttaaaattattaatgtatttgaaatatatatattgaacatgtgtgaatttaattaatgattaatttgaagtatgaagactaaagatgaaaaagataaagtagttgatagaggggttttgcgtattattatatcctgagattccattttttgataagtttttctaattaattttgctgcggtttgggttgtcaggagtcgaaatagaccgatttttctggctatctctaggctggatattgattgttatgcaatcaataaaatgttgttatagttgtttttttattcattatcttactgtattttatgctatttttgtatggttagtgttatctttgcatggtggtatgcatttttagttaagccttttgcttaaaaaaagcacaaatctaaacgaaaagtgatcataccagtatcttttttgcaactaaattttacataaactcaatctgttttatcgtacaagtggagatgccggatctcagaataagattattgtttacacttattactcagggataaaactgtcttttttagtgctagtttgactcaagataggattttttatcgttattttaaatttataagtttaatagatcgtataaaatcaaaaaatatatctaatatttttatttagataatttaacttattaaaattgagaattcggattttatttaattgtttgaatagttaatgagcaattcatcgattaaatgcatattaaaagcccttgtttttgtgagttatgtcacatagtatttaaaattgcgccctctttccgttgtataagttgatgattcaggagtaaagttgttctgcattaagaatattcttaatcgccaatgaaaaatgttatatcaggtaacgcaataatacttttgcatctcactaccgtaatatttttgaagttggatgaatcaaaagtaatacaaaggatggttactgctctgactaagcctgtatattttagttatgtaagagattattaatccctaagctattttaggaattttgtcacgagtggtttttcgaacacttaactgattttttaatgtaatcggacgggatagagaaatgagtacggttgaattgctcaaacatatttatgacataaatttatcgtatttgcttttagctcagcgattaattaaccatgaaaaagcgtcagcgatgttccgtttaggtattagcgattctatggctgatacgttgtctgaattgacattacctcagttggtcaagctcgctgagactaatcaattagtctgtaatttccggttcgaagagagtgaaactattcagcagcttactagggaatctcgagtggatgatttacaacaaatacatacaggcattttgttatcgactcatttgtttcagaagttattttcgaaaaaagacgatacgtcagtgaaaaaaagagcataagagatggccgagaaaagtatagttcaagaagctaaggatatacaattggcgatggaactcatcactttgggggcacggttacaaatgcttgaaagtgaaacacaattgagcagagggcgactaattaagctttataaagaattgagagggagtcctccgcccaaggggatgctgcctttttcaacagattggtttatgacgtgggaacagaatattcattcatcgatgttctataatgcctatcgttttttactcaagagtggttattgtgaaggtgtagaggctgttgttaaagcgtatcgactctatcttgaacaatgtcctcctgctgaaggggatgcaccggttttggcgttgactcgtgcctggacgttggtacgttttgtggacagtggcatgttgcaaccttcacaatgtcggacttgtggtggaacttttattactcatgctcatcaacctgtgaatagctttgtttgtagcctttgccaaccgccatcacgtgcagtaaaaaaacgtaaactttcctcagagtctgccgatactaattcacaactgctggatggacttgctcagcacgcagtgtgaatttaaatgggaaaattattcctacaggttacagattttactttttcctcctgtaacctgtattgaaatcacaaccattctggattcaaactgctcaacttcccatccgctcaccagcttagctaaaggatatcgcgtgttagtacttttaggatatatcgtagtttttggtgcggtaatcggtggttacctgattgtaggtggtcatttaggcgcactttatcaacccgctgaatttttaattatcactggtgctggtatcggtgctttcattgttggtaacaacggaaaagcgattaaggcaacattacgtgttttgccaaaggtcatgcgtagatctaaatataacaaggtgatgtatatggatctgatggcgttgctttttcggttgttagcaaaatcccgcatgcatggtgtcttagcattagagcgagatatcgaacatcctcagcagagtgatattttcacccagtatccgcgtttgcttaaggataagcatttgatggattttatcactgactacatgcgattgattgtgagtggcaatatgaatccccatgaaattgaagctttgatggatgaagaaatcgaaacttatgagcaggagagcgagattccggcaaccagcttgatgatggttggagattctcttcctgcttttggtattgtcgctgctgttatgggggttgttaatgctttggggtcggcagatcgcccggcaggagaacttggcgtgctgattgctcatgcaatggttgggacattcctcggtattttgctggcatatggttttatctcgccattggcaacattgctacgtcagcgcagcggtgaacatcttaaaatgatgcaatgcattaaagtgacattattgtccagcctgaatggttatgctccacaaattgcggttgaattcggtcgtaaaacactctacctcacagatcgcccttctttcactgaattggaagaacatgttcgccgggtaaaagcacctgttcagcaagaaactgaagaacaggtatgaaaacgcgtaacgtctcagtcattagggtaaaaagacgtaaaaggaatggcatcaaacatcatggtggttcatggaaaattgcttatgctgattttatgactgccatgatggcattttttctggttatgtggctgttggcaatttccagcccacaagaattgacccgaattgcagaatatttccgtaccccgttacaagttgcaattaataaaggggagcgtagcagtgatagctcgaatcctattccaggaggaggggaagatgtgcttcatcaggaaggcgatattctgcgtcaggttgaagtcgttgaagctaatgatgaggctcgcaagttaaataggctgcgtgagcaacttgatcaattgatcattacggatcctcgccttaaagcattacgtccacatctgttgattgacatgatggatgaagggttacgtatccagattattgaccgggaaaaccggccaatgtttatggttggcagtgcaaaagttgaaagttacatgagtgacattttgcgggctattgcacccatcttgaacgatattcccaataaaattagcctatccggtcatactgatgacttgaaatatgctaatggtgagcgtggttacagtaactgggaactctccgcagatcgggcgaatgcatcaaggagagagctgttgataggtgggctggatgaagtaaagatattgcgggtagttggcatggcttcaacggttcgtttgaaacaggaagatgccagtgcaccggttaaccgtcgtatcagtatcttagtgctcaataaacaagcggaagagcggattgaacagcaaaacaccggcagcgactccttgattattaatgatagtaaggaaattcacgaggtgattggaaaggattcggctgaaagtaggccaacacagcagtccaatgaaatcacagtattggcccagccagcaccagcgtcgcagagtgctgagcctaatcgtgtaccgaccaaggtgacaaagtaacgatggatattaccgcgttttatcagaccttttttgatgaagcagacgaattgctggaggatatggagcagcatctattgcagctcgatcctgatgcgccagatcaggagcaattgaatgctatttttcgtagtgctcactcaataaaaggtggcgctgcgacttttggttttatcaaactacagcaaaccacacatgttctagaaaatttgctggacagtgccagacgagatgaaatgagtctgacgactgatattatcaacctgtttttagaagcgaaagatattatgcagcaacagttggatgcctataaaagttctcaggagccggatgaaagtgcgtttacctacatctgtgagactttgcgccagcttgcattggaagtacagagagagaatgaaggcggggttgagtctgccacagatgcggtgatgccagaggtgcctgaatctgagccagaattaaaatcggagcctgttgcgactgaaaatcagcaaggtagagttcgggttcatctttctggtctgaaagagcgtgaagtttctctgatgcttgatgagctgagtaatctgggggaggtttatgatgctgaacagactcgggatagtgttgaagcatcattggtaacatcagccacagaggatgatatcacggcagttctctgttttgttattgaaccggaacagatcactttcttgccggtagctgaacccaaagacaaagttaaaaataaagatacagatacagctaaagccgttaaaacaactgcaccggaaaaaggttccacaccgcctgccgggcgtcctgcgccgataccaccggcgggatcgccacgtcaacgggcagaatcttccagtattcgggttgcggttgagaaggttgatcaactgataaacctggttggtgaattggttattacccaatctatgttggctcagcactgtaacgctcttgagccgactttgcatggcgatttgctaaattgcatggttcagttacagagaaattccagagatttgcaagaatctgtgatgtctatccgtatgatgccaatggaatatgtgttcagccgttacccgcgtttagtcagggatcttgctagcaagctgaataaaaaagtggatctaactttggttggcagttccactgaattggataagagtttaatcgagcgcattattgatccgctaactcatctagtccgtaacagtctggatcatggtattgaagagccagaagctcggcttgctgtgggcaaacctgaaatgggcaacttgacactttctgctgaacatcagggcgggaatatctgtattgaagttgtggatgatggtgccgggttgaaccgtgaaaagattctggccaaagcgatatcacaagggttatcagtcagtgaaaacatgagtaacgaagaggttgcgatgttgattttcgcaccgggtttttccacggctgaagttgtaacagatgtatctggccgcggtgtaggaatggacgtggttaagcgaaatattcaggaaatgggagggcaaatccagattaacttccaggcaggtaaagggacagtgacgcggattttgttacctctgacactggcaatccttgatgggatgtcagtgaaagtgaatgacgaagtgtttattttgccgttgagtgcagtagtaagttctcttcaaccgcaggaagaagatatttatcccttggcgggagatgaaaaattattgcatgtcagaggagaatacttgccactcattaagttatatcgagtttttgatattcctgatgcaaaaacagatccgacgaaagggattattgtgattgtacaaagtgcgggtcgtcgttatgccttgctggttgatcaattagttgggcagcatcaggtggttgtgaaaaatatcgaaagtaactatcgcaaggtacccgggatctccgctgccacaattatgggagatggcagtgtggcgttgattattgatatttctgccttgcagcaactcaatcatgaccaattggcactcaacaaagctgagttattagcaaaaaataagcactgaatggggaggaatccccatggaaaatcgtcaatctcatagtaaaaggtaagatcatgtcggccatagaagcgtttaataaattgtcaggagaaactgccggggaaggatatttagtttttaccctaggtgatgaagagtatggtatcgaaatactgaaagtacaggagattcggggctatgatcaggttacccgtattgcaaatacgccagcattcattaaagggataaccaatctgcgtggcgttattgtgcctattattgacctgagaattaaatttgctcaggaaacggttacctataatgataataccgttgttattgttttgaatctgttaaaccgggtggtgggtattgtcgttgatggtgtttcggatgttttatcgctcaaagctgagcaaatctgtccggcacctgaatttgcagtaacattatctaccgaatatctaacaggattgggttcacttgatgatcgcatgctgattttggtggatattgagaagctgcttaacagtgaagagatggctctggtagattcagtagccaaaagttaatcattaaatatcactgccatcatcgacatcgacatcgacagatggcagctactttttgtctatccctcgttaatttcatcagaaaaaatattcaaatttcttttatacgaccagtaaagtttcctttgatgatgccgataacagagccatgctgatctattgtaaaaagggaaaacatgtttaaccgaatganaataatgacccgactgatggcggtcatcatattatttggtgctctgcaatttatatccggaggacttttcttccatgagttgaaaagtaacaaggaaaatctagaaatactggataaaatgcgggaacagcagacatttttgaatgacacttgggttaatttgttacaggcccgtaacaacttgaaccgtgcgggcattcgttacatgatgaaaaaagatgagggagtcgataattactacacactggagcagttactgacagatgccagaagtaacctctctatcgcagagcagcgttttgaacaatacgaacagaccgctaaattgcctattcatgaatcagaaagtcttaatcgccttaaaaaagcctatgatgtttatatttcagcgcttcatgaacttattgttctgcttgaacatgatcgggcggtagagtttttcaaccaaccaacgggcaaatatcagagcgcttttgaggaagaatataacttctatttgacccaaaacgatcatctctattctgatgtggtatttgatgccagtatctcttacagaaatgcggtgattatgttgggtattatcatgctgattctggtttcagccatgatttttagttgggttagcattaagcatagtttgctgaatccgttaaacaaattattggagaatattaaggcactttctaccggtgatttgacacaaaatgtaactgtttcaggcagaaatgagatgagtacgttggctgttggcctgaagcatatgcaaaaagaatttatcactactgtcagtagtgttcgtcaaagcagtgaaagtatttataacggaaccagtgaaattgctgctggaaataatgatctttcttctcgcactgaggaacaggttgcttctttggaagaaaccgccgccagtatggagcaattgacagcaactgtacgccaaaatgcggaaaatgctcgtcaggcaagtaacttagctgatagtgcttctgaagttgcacgccagggtgggaaagtcgtggcgaatgttgtacagacaatgcgtgaaattgccggtagttctcagaagatttccgatattactagtgttattgatgctattgcgttccagactaacattttggcactgaatgccgcagtggaagcagcacgtgctggtgaacatgggcgaggttttgctgttgtggcaggagaagtacgtaaccttgcacagcgtagtgctgaggcagcaaaagagatcaaagcattaatagaagattcagtaagccgcgcagataccggttctgtcttggttgagagcgccggtgaaacaatgaataacattgttagttcagtcacccgtgtcactgacattatgggtgaaattgcatctgcatctgatgaacaaagtagagggataactcaggttggcctggctatctccgaaatggatcgtgtaacacaacaaaatgctgctttagttgagcaatccgcggctgcggcggctgcactggaagatcaagctgctggattgaagaaactagtttctttgttccaattaccgaatcttgacgataaatctcaatccgaaatgaaaattgagcatttgcctgtggctaagactcctcctgcaaaatcgaatccactggtgttgaagaaagccaacaatgtggaagaacaagctaattgggaaacattttaaaacactaagcgataactacggctgcacatgcagccgttaacagaggtgattacatgttaggcaggcttcgtatatcaaccagtttatatctgttactgatgatgttttgtgtaatgcagataatctcaagtggtttatcacttggaatcattcacgcagatcaatcttatattgagcagattgatctgggaacacagaagagggataccttagggttgagctgggcagctctgctgcaatcgcgtaatacacttaatcgaatcgctgtagggaaaacgttacaacaatctgaggatcatattggcagtatggttgctaatgttaaggaaaccttagatagggctgagatgcattttgctgagtttattgcgctgcctaaattgaatgacgaggatggtagtagtgtattgctggcctcggtagaaaccagttataaggaatatatcaacgcgcttagagaactctcggcttttttagaaagtggtaattatgatgcattcttagatcagccgacagaaaagtatcagcagcaacttgaatctgatttcaatcattatatgcaatatatcggtgaggtgattacaaccgccgttcaagatggtcgtctttattaccaaatttcagttgccatgtttgtaggtgcgatcttaatggtactggttgttgcttgggcggctcattggtggttgaaaaagaatcttctcagaccttttgccaatatgcgtagtcacttccagaatgttgcggaaggaaaactcaataaagaagtttctgttttcactcaagatgaaattggtgaagtgttcctcanattacgtgaaatgcaacgttcactggttaattccattacgttggtaaaagagaatactaacttgatgtataacggtattcaggaaattactcagggtaataccgatctctcttcccgcactgaagagcaagctgcatcactggaagaaacggcagccagtatggaacaactgactgcaactgtgcgtcagaatgcggaaaatgctcgccaggccagtgaattggcggtatctgcatcgaaaacagcctctaaaggaggcgaactgaccgttgatgttgtggaaacaatggatgcaattgccaatagctcacagaaaatcagtgccattatcagcgtcattgatggtattgcatttcagaccaacattttggcactgaatgcggcagtagaagctgcacgggcaggtgaacaaggccgaggtttctccgttgttgctggtgaagtgagggatcttgctcagcgaagtgccgaagcagcgaaagagattaagacattaattagtgaatctgttcagcgggtaagccaaggttccgagttggttagtcatgcagggaagaccatgaatgaattggtcgtttctgtaaaccaagtcacggatctgatggctgaaattgctgcggcatctgatgaacaaagtcggggaattcatcaagtagcacaagcggttacacagatggatcaggttactcagcagaatgcggcattggttgaacagtcagcggcggcggcggcggcacttgaagatcaggccgatattttggtgcaaatagtggcacaatttgagttacccaataattcagaaaataagcttgaaaatgaactttcactgacgctgaggtctgcggatagcgaaggggcagtcaatcagactcactgaggccagatgaaatcaaatttaattgcttcagtgacaagtttgccatcttcgccactgcatcacatgattcagcgttataccatgtcagatgcgcattttgagcgcatctgccagctcatatatcaacgtgcgggtattgtgctagctgcacataaacgggagatggtttacaaccgtttaattcggcgtttgcgtaccctcgaaatacgtgattttgggcaatacctgttcattcttgaaaatgatctgaatagtgaggagtggcaggaatttatcaatgcattgacaactaacctgacggcgtttttcagggaagcgcatcattttcctctgttagctaaacatgcaagtaagaagaatggatcgtaccgggtatggagtgcagcagcatcgacaggagaagagtcctattcgattgcaatgacactaagtgatgtcttaggggagcgttttcaccgggcaaaaattattgccagtgatattgatacccatgtattggaaaaagcacgcaaaggggtttatcgactggatgaattgcgtcacctgaccgatcaacagagaaaacgttacttttttaaagggattggatcttatgagggttatgctcgtgtccggccgcaacttgctgacatggtgacattccagcatctaaacctgttagatcccaattggccgtttgaagagaagtttgatgccatcttttgccgtaatgttatgatttattttgataaaaagacgcaggaacggatactgcgccattttgttgctttgttaaaacctgatggattgctctttgcagggcattctgaaaatgtcactcaaataagccgggaattctacttgctaggacagaccgtttacggtgtaggccgggcaaggagaggtcatgaataaaataactgttctttgtgtcgatgattcagcgcttatgcgtcaaatcatgcgagagatcatcaatagtcactcggatatggaggtagtggcttgtgcgccagatccactggtagcacgtgatctcattaaaaagcataatccacaagtgctcacactggatgttgaaatgccacgcatggatggtattgattttctggaaaaattaatgcgcttacggccaatgccggtggttatgatctcttctctgacagccaaaggctctgaaatcacattaagggcattggaacttggtgctgttgattttataaccaaacctcaattgggtattcgtgaaggcatgctggcttacagtgaacttattgcggagaaaatacggacagcagcacaggctaaattatctgtgccaataatcacaccggtaagttctgctcctttaagttttaagcctttgttatccagtgaaaaactgatagcagtaggcgcttctactggaggaacggaagcaataaagaatttattgcaaccgttacctgtcactagcccggcactccttattactcaacatatgccacctggttttacccgttcttttgctgaacgactgaataaacttagccaaattaccgtgaaagaggctgaaaatggtgaacggattttgccggggcatgcttacattgctccgggtgatcgccatatggaactatgtcgcaatggtgctgattatcaggttctgatcaccgatgcaccggctgttaatcgtcatcgtccatctgtagatgtgttgtttcgatcagtggctaaatttgccgggaagaatgctgttggagtgttactaaccggcatgggcagtgatggcgcagcgggtttactggagatgaagcaagcgggagcgtacacgttggctcaggatgaagcaagttgtgtggtatttggtatgccaagagcggcaatacaaatgggggcggtggacgaggtcatggatatactcaaaatgagcaagagaatgctggcaaaaataagctcggggcaagctgtccgtatttaacggctgtcggatatacactaaagatttcaagatgcatcgcgacggcaagggagtgaatccccgggagcatagcaaactatgtgactggggtgagcgagtgcagccaacaaagaggcaacttgaaagataacgggtatacactaaagatttcaagatgcatcgcgacggcaagggagtgaatccccgggagcatagcaaactatgtgaccggggtgagcgagtgcagccaacaaagaggcaatttgaaagataacgggtataaatttaatattttttaagcggctctgtgctgactggtaactaatttcaaggagtttttatggcgaataaggatctgagatttttggtggttgatgatttttcaaccatgcgtcgcattgttcgtaaccttttaaaagaattaggctttaataatgtagaagaagctcaggatggggcagaagctttggctaagattcgtgcatctcaatttgattttattatctctgattggaatatgcccaatatggatggtttagagttactaaaaatcattcgtgaagatgcccaattggccaagataccggttttgatggtgaccgcagaagcgaagaaagaaaatatcattgctgctgcgcaagccggggccagtggttatgtcgttaaaccttttaccgcagctactctggaagaaaagctcaacaaaatatttgaaaaactgggcctctaaggagacataatgagtgtaaatccagtcatgccaagggatgagaccattagcgccagtgaaattatcagccgtatcggccagcttacgcgcatgttgcgtgatagtttacgtgagttgggattggataaaactattgctcaggcggctgaggcaatacctgatgcaagggaacgtttggactatgttgtgcagatgacagcgcaggcggcggaaagggcgcttaattgcgttgaagcggcgcaacctcgtcagaatgagttagagtcatcggcaatatcactgaaaaagcgttgggatgagtggtttgaaaacccagttgagatgcctgtggctcgctcgttggttatagatacccggaattacctcaatacggtacctgaacatactgctttcactaacgctcaattgctggagatcatgatggcgcaagactttcaggatcttaccggtcaggttatcaagcggatgatggatgttattcaggaaatagaaaaacagttggtgatggtattaatggaaaacatgccggctgatcaggtgataaaaaccaagaaagaagctgacagtttgctaaatggtccgcaggtgaatcaaaatggcgtgggtgttattgctaatcaggctcaggttgatgatctactggatagcttaggtttctgaataaacaaccacctactaaagtaggtgggttagtgattaatggactgaaagtccggatacgcgtcggctaaacgacgcgtcaattatccatcctgaaattatcattcggattgggttcaaaatgatgttctaaatagcttttgatcatttcctccgttaactgccccaccgttgcacaaaaatagcctcgcccccaaaaatgttggccccagtaccgctttttcaaatgcgaaaattcttcaaacagcttactggccgttcttcccttcagccttctcatgatttcatttggcgctaatgttgggggactgctgacgagtatatgcacgtgatcttgactcacaactccctttaatattctgatttcaaaggagctgaatgtctgacggattaattctcgcactcgacttgccacttctcctgtcagcactttgtatctgtatttcgttacccacacaaaatggtattcaatctgaaataccgtgtggctgccatatctgtaatccatgttgcacctccggtacaacacagtatcgcagctaaagctgaccggctaaagccggtagttaatgagatggtcaccctcacctaagccatcatcgcgtttttgacaacagcgcatcaccgcacgggcaccatgaatgattaacgttcgcaggtgacggttaccctgtttggtcatgcctgacaggcggcttttccccccagaactgtattggcgtggaaccagaccacactaggccgagagctgtcggccatgcgagaattgttctgcattaacttcactgataaaagccgcggcaatcaatggcaccacaccgggaatggttagtaagtgggagtaacttgattgctggtttgataccgtctgaatttctttatctatttcgtgaatacgggcatcaaatcgccgcatatcttcctgtagcgaatggagcagacggcggaggacaaaggataatgaatggtttccctcttccaaaatatcaggtaaagcctgccggagttgctggatgctcgcagggataacgatcccttgctcggcgggcaacgcccggatttgattaaccagtgcggtacgttgttccaccttaagttgtcgggcactgcatagtgctttgatatcctgttgttcaagggttttgaccagcacaaagtggataccgggacgacaggcggtttcacagatagccagcgcatcattggcatcatttttctgatttttacagagtgccttgacatgctgcgtcgggataagcctgatttcatagcccatggcttgtagcgttcttccccagtaatgagcactctgacaggccctccatcgcaataagtgtatcgggaggaaacgcccagagtgtatccagcaatttttgccgtgagacttttttgttccaggcgacggagttatccgttaaccagacacagacctggaaaacatttttagcgagatcaatgcccaccactttggttgtgttcataagaacctcccgaaatgcaatatattcagtatcaagtcaaagatgacacgatcagcaactgaaaaagggagcgtccatcatatcactacataaagaaaccggataactttcatcgtcagacggtgggtgatgtgtccaacgatatctgcttccaaaagtgcgcagatgtaccacaattttgttctcccgagttttcgttcgccacctgatggataatcctttcaggcaatggagcacgagtaatagttattatcgattggattaagcggggcaaatttttgtttgattatgagaatagcttcacctctattcataacattggcagcttacaatatttcttaatctatatggtggacgtttccgattgtacaagcattggagtaacctctcatctttttctcacaagcgttacacttatttaaactggcggcagtttatatttgtgtttatgtggctgaaaaccgcataaactctgggtttgtaacgatgtagatcacctccaggttaatattatctgaactcctgttttattttgtgatgattatcacggataaatcgcatttatatgttaatttatggttaactaaaagtaggtattttacataaatttaactattgttttttcatttttcaattcattgtataagtcctcagggcgagagcatgggcacctaaatttcatttagatagagttataatcaagcagtgttggcagtaatactcattgaactatttgaaatagcatcttgatctgattggcttttaaactgaggttgttttatgttgaagaagttactcaaagagaagaaatcgcttacttttattgaagcacataacccgctttcggcactcattatcaaaaatacaaattatacagatgataatggctgtacccataaatttgatggtatctggtcaagttctttaactgtcattccgcagctatatctgtaatgtactgatttaaaatcgtttgtataaaatttattcatttattaattcttaattaaaacaacaaattacgaatgcggtgcggaatgtcggctttaactgactcagctgttaaaggtattcctgataacgaaacattggatattaatagtcgtttacaaaatattcatgagataaaattactcactaaaatgccggttattatggatgctgacacaggtggacgggttgagcattttgtccattatgtcagaaaaatggagcaggtaggtattgatgcagtcattattgaagataaaacgggcaataaaaggaattccctgtttggcaccagtgttaaacaagaattggctgatattaaagaattcagtaacaaaatagctaaaggtaaagctgcacaacaaaagagccgattaatgatttttgcacgactggaaagtttaattgctggttacggaatggaagatgcattggagagagccaatgcctatgttaaagcaggtgctaatggcattatgatccatagctgccagaatacgtctgatgaagttattgattttagtcagtcattcagaaagaaatatccaaaattaccactgatatgtgtaccaacgacttattcagcaacttatcatcatgatctgagcgaagcaggttttaatattattatttatgccaaccatatgctcagagcggcttataaagcaatggaacatgtatctcacgaaatattaaagtatggacgttccgcagaagtagagaaagattgcataagtataaaaaaagtcatcaatcttattccttatgcatcttgatgcttgagttttaatatttttctatcaagaaaatatattctcatatatataacctatggatttcgagttgcatcgtggtggcaaaagagcgaattctcgggagcatagataatcgtgtgtttataaaaacggcgaaggctgccagaaaagaggcaatttgaaagatgacaggtatagtataatggaaagtgatcagaaacaactcgtgcttggtgcttatcttacttatggtactgggcatcacccggctgcatggcgtcaccctgatgttaatccgcaagctgcacaagatatcgggcattatctgaatatggctcgtatagcggaaaaaggtttattcgatttaatttttctttctgatacaccttcggtttttcaggatgatcagcggggttatggtagccgggtagtcatattcgaacccatgactcttttatcagcattggcaatggtgactgaacatatcggtttggttgctaccgcatccaccacctataaacatccatttaatattgcccgtgaatttgcttcgttggatcatattagccgtgggcgcgctggctggaatctggtgacctcgtctaaatctcatgcagcgaaaaacttcggctttgctcaacatcctgagcatgatgaacgataccatcaggcggctgaatcctgggacattgtgactggattatgggatagctgggatgatgatgctctgccacgtgataagcagagtggtattttttatgatccatcaaaatgccatgaattaaattttcagggacaatatttctccgtaaaagggccattgaatatttcccatcctcctcaggggcaccccattattgtacaggctggttcttcagaaccaggaaaagaattggcagctagaacggctgaattagttttcactgcacaacctgatatgaatttagcaaaagcattttacagcgatttaaaatcccgactcagtcaatatgaaaggcactataacaatattttaattatgccggggctgtgcttttttattggctctgatgaagagagtgccaaaaagaaatttaacgacttgcaggcgcttattcaccctgaatttggtctcagcatgttatctgatttgctcggtggtattgatttatcaggctacgatattaatcaacctctgccagatcttcctgtttctaatgggaatcaaagccgtcgggcgattattgaaaaaatggccagatcagagtctttaacgattaaacagttatacgaaaaaatcattattgccagaggccatttaatttgtattggctcttaccaacaagttgctgaacaaatggtgcagtggctacaggaaaaagcctgtgacggatttaatcttatgcctccttatatgcccggatgtctggaggagtttgtgactcatgttgtacctgaattacaaaaacgaggagtgttcaaaatgggttataaatcagggacattaagggagaagctgaatattcccaaaccgcccagtaaatttcacgtttaaataatactcattaataaaaaataaggttttgacgctatgactattcaacaaaatattattctggaagatacaacgttacgcgatggtgagcaggctcctggtgttgcattttcaaaagaaacaaaagtgagtatttttaattcgttggtagacgccggtgttaagtggatagaagccgggatacccgccatgaaaggggatgaagttctggcattagaagagatgctggaacgcaagaatgaagtgaatattatcggctggaatcggggggtactggaagatattaaatatactttctctctgggatttaaggcgatacatatcggccttccgacttccaatattcaccttaaacacagtgtgagcaaagacagatattggttattaatgaccgccagcgatatgatcaaatttgctaaagataaaggtgcttttgtctcaatcagtgccgaagatgttggccggacagaaatcagtttcttgcaagaatatgcggctaccgtcgagcaggccggtgccgaccgtctacgtctttcagacacgataggcattctgaatagccagcaatatgcacagcgggtttctgctgttcgtcaggcatcagccattgatttgcagtgtcactgccataatgacttcgggctggctgtagccaatacgctggcgggtcttgaagcaggggctcgttatttccatgtctgcgttaatgcgatgggggaatgagccgggatgccagatttagcccagatggtaatggctctgcaacatttccatcagatagataccggtgttgatactcgacaacttacccgcctctctcagaaagtcgctcaggccagtaaatatacaatttctccttggcaacctattgttggtgacaatgtttttgcccatgaatccggtattcatgtcaatggaatgctgaaagatagcaaaacatttgaaccttttgagcctgagcaggttggcggtcagcgtcgtctggttgtcggcaagcattccggtcgggctatcttacaaaatatgttagaagaagatagcataaagacagatccacaggcattggaatattgtctggcgctggtacgaaaagctgccggagaatatcccggcgggatcccaacacatgtattacatgaactctatcagcaggcagaaggaacatcagaatgatgattcatgaacagcctatcgttaatcagattattgctgaacacagccagaaaccccgggttatggctaaggagctgatcactgttgatgtcgatagaatttatgttcaggatgggaattcaccgactatcgctaaactctttcgccagcataatctgaaacgggttctgcgcccggaaaaaattggttttttcttcgaccattcagtgattgtgcctgataggttaatggctgaacgtgttaatgaagcaatggaatttgccaaatcgattggtgtcaatattttcgctagaggtgaaggtatcagccatttaattgccttggaagagcagtggtttcaacctggtaacattgtaattggagctgattctcatacttgtacagggggtgccgtacagtcactggccttaggcatgggagcttcagatgtattggcagcaatgctgactgggcagacttggctgaaagtaccagaaacagtcagtttaagtatttccggtcaaccccatccggctacacggactaaagatgtgatgctcgctttattgcgacatttcgggcaatccccctttttatatcgttcagtggagctatgtggagaatggagccagacactttccttagattctgctgccagtttcgccagtatgggtgtcgaacttggtgccaaatgcgtctttatgccggatgggcccggtaggccagccaatatgcggcctatcaatccagaggtcgttgatcatcatctgacatttttgctgtcagaactgacgcctcatatctccctgccacattcccctgctcagtcggtaccgctggaaacgctgtcagggcagaagatagattatgtctttatcggcagttgtaccaacagccgattagaagacattgcggaagtagcggcaatccttgataagcaccgcgtacatcaggatgttcattgtatcgttacgcctggttcaaaacgtgtatatctggaagctatgcgacgtggctatattgaaaaaattgtttctgcgggtgctctggtgactcctcctgggtgtggggcttgtgttggcacacaaggtaccattcccgccaaaggggaaagggttctttcaacgatgaaccggaattttcaagggcgtatgggcaatgctgaagcggaaatttatctctcatcgcctttagttgcagcaaatgtggcattacatggcagggagccgctgattacggagcttgaatggcatgattgatcaaaaaaaacgatttgcaaaaaggaatcccatcaaaaatcaacgcgtcaggatgattacgggagatatttctaccgacgatattattcctgcacgttataaacacatgtacaccgagccaactcaactggctcctcatctgtttgaaaaccggtttcctgagtttgtctccacacttcaactcggagatatcattgtctgtaatggtatttttggtattggtagttcaagggaacaggcggtgagcactttattagcagtaggtatacctatggttgttgctcccgctttcgggcggatttttttccgcaactcatggaatcttggcttgttagcgattgaagccgacattaaaggttttcgtgaaggattagctgttgaatgcttaattaacgaaggccgttttatcgctgaaacgtcattagcggatttttatccaccatccgaacaaatgttggcggttgtccacgcaggtggacgactcaattacatttttaatcaattgcccaaaaacccatcacccaaagagaaggagcagaggataatatgacacagcataaagagaaatttgatggtttggctaaaggttatgatcgctaccgccctcgttacccgcaagcacttttccgtgaaatttgccactggctgcctaaagacaaggcactgtctgttgtcgatattggtgccggaactggtattgctctcgaaggactagcaaatctgcttggtcagcaacaccactacactgccattgatatctcgcaggatatgatcgacatcggtaaacagaaactgccatgggtcagttggttacatggcagtgctgaacagcatctcgccaatgtgggtaatcctgacctgatcatagcagcacaatcttttcaatggatggatcgggcaacggtattaaatctggtcagaaacagtctggcagataatggcatcatagcgatcctgcaaaataaccgagattaccggcatagtgaatttctgaatgagtatgaaaatctgctggaagaattaagccctaactatagccgtcactatcgggattttgattatgcgctggaattgaatacggcattcctgcatgaaaatgcccttcatattacacttaatacccgctggagtatgcttattcccggcgaagcatttatcgggatgagtcgttcatcgactcaagtgcaacgtgctttagctgcctacggtgagttatttatcgaaagattaaaaatgctggtggataaatatcaatttgaggggaatttggcaattttatatgaaagccaactgtttatggttgttaagcaggttaattctggaaatgaataatgtcagaaatagcaatcagcttctctataccaactgaggaagatatcaagggaatattggtactcttgcaagacgtttatctgccatttgtggctgattttatgccgacagcactgaatgaaacgcctgtcagtattatggagaagttaatttattggagaattgctaaatatgataatcaggttgttgcggctgtattaattgagcaagaggacgataatttaacattcagttatttatctgtattaccggcattcaggtgccggggaattgccagcaaattactcaatatcatttgccaagaagcagtccagcaggcgcaattacctattattattgcattacgtcgttcactggcgatgaatattcatttctttactcaacgaggatttgaatatttaggcccttttaataccaacgaacacgatctctatatctggcgatcaggagaaaatgaatgaacaacacggttattgtattaggatatcgtgaaggtattgcgacagctctagcccatcagggatatcagattattcatatagtgaaaagagttaagcctgcccttaatggcacgaggtactatatagttaaaaatctagaagatgcacaagaagttcttcggtgtgtattaaacttttccttacatacagttataggtattgttacaggcaacgaagacggtgtatttacggcggcggtattacgcgatatgttgcaattacctggccctaaagattatcgtaatactttatattttcgggataaatttttacaaaaacagaagctggcacaccttgtccctcatgcttattgccggtatgtaacccgtgatgacgattattcacaattggttgttgagttaggtacccctttcatcataaaaccagctaatggcatgggttcttttgctactactgctatcaactcagaatcagagtatgaaacttatttccaacagtatgaaaaaaatctaagtaatgtggcctacgttgcggaaaataagatcactgctgatgaattttgtgttgatgggatttggtctgaaggtaaattacattggttctctatcagccaatatgccaccccggtgatgcaatgtaatgaaggaaaaacactggctttacaaatactatcacgtcgagattttccagatatttaccaacaaattgatcagttttgtccacgtattttggaacgtttagatgccgttaatggggtattccatcttgaattttttaaaaatggggaaggggtattttttagtgaatgtgctttaagacctgctggtgcctgggtacctgaaatgataaaactgagctatggtgtcgatctatatagtgctcatgccacactttctttggggctaccttatgaacaccacctgcttgaatatccttctcagctttttgctgttgtgctattacgtgcttttgacggtgtttcactgacaaaacagtctttttaccagaattttgatttggttgaactggattggacagaagatacacagatgcaatctcaaggtatttatggtcgtgctggctacgcgattatcacgcataaggatcactacacattagtagaaaatgtcaataaacttattgcgtttacgggggaatgataatgtctgaacgagcccttattctggatactcacaaaataatgttagaacaatcgattaatcaacatcagaatattgattatattcgtgtttctgaaccgcaggtgtactttgcttcacaggagaaaacgctggcaaaaatagataacataatgaatcagacgccttttcattatgtggttgcaagttcagagagtaacatggcatttgctggatttctccgtagtcgctatggattgccaggcttaaattatgaacaggcgttatgtgtaaccaataaatggcgtatgcgtaaatgtcttgaagatgaattacctgccccaaggtgttggctttccggtcatttctacaacaattttgcacaatgtacccaaggagcagccacccattttattattaagccgctgtctagttcttcatgccagaatgttgaacgtctaaccgtcgatcagctgtatcaaaaacttactcatctggatacattaatgttgattgaggaagaaatagatatagaagaagaattccatcttgacggtatcgtcaatttgtctgagatcgctgtagcctgcctttcttgttacagccttcctatcctcagtgccagaggtcaaacaagggcaagtattcacctaccttcatcccatccaatgttttcaatagcctattctatggctcaacgagccattaccaaattagcgttaaaacaaggtgtttttcatatggaagtttacagacggggtgaacgattaatttttggtgaaattggcctacggccaccaggagttggcgttgctgagtcactactgcgttttactggagtaaatttatggcaggcttttgttaacagccagttactgcgcccaattaataatataccatcacaggattatcacggttattctggggttattggtgtttatcccgagaggctcagagcatcagatttattacgtttaccaaatgttgttgctgtatcggaattagaaaaaacacgccataaaatgacacgtactggtgctcacgactttcgctatttggcattcgcctcatgtcaaagtctggctgaatttcataatttgattaatcaattgtcagactcttccccatcaacgcatgttaagagagaagtacaatgaagaatcaacagttattgcggaaaaaatttatagggttccaaacttatacggctttttctgccttagctgaggggatgcaaagtgtgattattctctggttggttttccaaatcacacatagtccattagctgtcagtctcacgataatagcagggtatcttccgtccgcaattatggggttttttcttctttcatttgctgatactaaaaaccctgtccggcaactcactgtcagtaatggcatcctcactctgtcagcactctgcctgccactgttttttttattttcatcaacacaacctacactactcatgttggcagttgtaactgtacaaagcattttatctctagtgaagatgttcaataaaacgtcggttaaccgtattgtccgggataattttacgccggaggatggcagtaaaatgttgcaaatttcggcagcaaatattcagatttcgcaaacatcgggtgctgcattgggaggagtatttctcacattggatgctggtaattcaggcttatttattgctggttttttttatgccgccagtacaatagcaaccggcttttttacttcttttactttatcagtgataccaacaacagttcataccgataaaaaacagaaacaactactggataaggcgtatctcgttcatgtatttaaccgacaggaattaagaaaagtattattattttcgattcctgccagtggtgcattgcaatttattaatacctctttaccaccactggcggatattcttactgaatcgggggcgaatttttacgcgtcactcaatattagctgtatgatagcggggtttatctctgggttacttctgtcgcgaaaaatagtcggagaaaaatttattcttaatcatgcgctattaatcagtgcaatcataattgtattaatggctggagcagagaataaatatctggtagctgcattgttattttgtgtaatactgtttaccacctgtcacattatatgtattcaggtgaaatgtaaccaggtgcctgaaaaacaggatgtcggcaaatttattatgctaagaacatccattgcttcattgtctaagataacgttttcattaggtgctggggcattattatcactcttttccctgaaaactacttattacttggtggttggtatcttattattattttctttgcaatggtatttatctcagcgagatttaccttataaaggaataaaaaaacatgaataatataatttatcgttagttagttatttcacagataaataataaaaaatctctgctttttccaaccatgccggatacattatcacatcaaatatggtctttattaggttggaatgaggtaacattgaaacgttttctctgtgcaaaaaaaatatttgtcactttaccccatgccagtcctaatatcttttttccacgggctggtgtcagtaaattcgttactgacaaacagaaggaagaccatgaaatttttcatctccgggttgtgctgactcacacaaattttagtgatcttggctggcgtccttattcttggtggtatctcaatgaggaaggagtattaataaaacaatctatattcagtcgtaataaaaagaaaaaacattatattatttccagtcaacctcctttattattagataaacagtattatccctctgttcttgggcatggcatacaattagcgcaatatgccgataatctggctctctcatatattattttgcaggcatttcaggaacagttatcggggttttctcttgccgccagaaccctttatctcccactggatatattgatcttattgatgcagacacttgccagacagcaacctggtgtacacccttggttattgaatttattaactcatgcacaaagccgaaaacttaatgaatatcaacttgaagatacacatcagtgggaaaatgcatatgtttatgataattatacaaatatatcactattatttccgttggctccgactgcaatcgtcgggggaataaagatgcagcggtattggccggatattattgatagtgtcagcataattaatgaaaaaaccacaactccttgcccgataccgcaatgtcttgcttttccacagtgtcaggaatatctgttaccttaccggcctaaacaggaaacattacgccaaattcagatggcagatattgaatacagtcttgcaatggcaataaccgaatattagctttatgtaacttcataaatttgttactacatacttagggtgtgtagtaagcatgtaaaattggtctaccacattgcattacaggtatacggtagtggttaacaatttccggaaatatcattgatagtattgaacggtattaatcttattctctctggcggaatgaaatagaacagttgtggttatctttgcatgaaacggttatatacccgtcatctttcaagtttcctctttgttggctgcacttgcccataccccggtcacatagtttgccatgctcccggggattcgctcccttgccgccgcgatgcatcttgaaatccatagggtataaattaaatacaatatccagagagcaccaaatcttttattacagtgatatcctgcttaatgaggtacttcaaatttaaagtaatcgctgaggagaactattttgtcgtccataatttctattaatgtcacgcccatattgctataagtatcactatttttacggcgtccttcattttcccaaataacgcaagcctggttattactagcaatgaaccccgtttgcctaaaatgtaaatattcaaaattcgaaaaaagtttcttgagaaaaataatcgacatctttttacctaccattggagtaaggcccggataataaagtgaaatatcttcagagaaaatattatccagccgtttaaggtcatactgattcattgagctaagaagttctgcggttaattcatctattcggttcattatgttttttcctctgttttatttatttgccagcataatcacgttaaaaatttaggtctggctaacgacttcattttcctgctgcaaagcgttcaatcgttgcaccagttggctgaccctcggtgcgttaaatagatcgcgcaacgttatttcaacgccgaagtcactacgcactcttgctattacccgcattgcaaccaaagattcgccgccgagctcaaagaaattatcctctggagagatattttctaatcccagcaactcggcaaacagacgacaaagcgagagttcttgtgggctggaggagctactttcattgattactacactgttccacatgggtttcggtaacgctttacgatctaactttccgttaatggtcaacgggaagtgatcaagctgcactattgctgctggaatcatcgcttcgggcaagcatgtggtcagactggaccgtattaactgtgattcaagcgtaatacctttatgggcaatgacataacctaccaaccgcttctgttgaccttcatcttcacgcacaatgacctcagattgcacgatatcagggtgtgcatttagcgctgccgccacctcgcccaattcaatacggaaaccgcggattttaacttgatcgtcagtacggccaaggaagtccagtaccccatcccgacgcaatcttgccagatcacccgtgcgatacatgtgtgcatctgtgccgataaagggatcagccatgaagcgttcagcagtaagttctggacgattcagataaccacgcgctacccctgcgccgcctacatatatctctcccacgaaacctaccggaaccgggtgttgagcctcatcaagaatataaataccgagatcatcaataggttcaccaataagacttgaagcaggctgagcaacgacttcacgtgaaagagggaaataggttacatgtacagtagtttcagtaatgccatacatgttgaccaactgaggagcgttatcatcgtgtctttgataccactcttccagaatatgcgcattcagtgcttctccgccaaaaatcaccgtgcgtagtaccaaactctgcccaagttcaggggcttcgcgatcagcatggatcagcgcctgaaacgctgaaggtgtctgatttaacaccgtcactttttcgctaactaaaagctgcaaaaaatctgtaggtgaacggctgacttcccagggaacaatcaccaatcttccgccattcaataatgctccccaacactcccagaccgcaaaatcaaaagcataagagtgaaacattgtccaacaatcagtttcagagaagttaaaccagcgctgagtactttgtagcaaacgcatcacattatgatgagtcactaccacgcccttgggcacaccggtggagccagaggtgtaaatgatataagcaggatgtgctgaaatcagcggttgcaagcgctctttgtcagacagatcagcaacactttgcatttccagataggtgagcaattcgggatcatctagcaatatcatggggatattggctgtcaggcgttgcgcaatttcactggtggtgatcacacaagcaggttcagcatcgtcgatcataaaatcaagacgactttgcggataatccgcctccaccggcacgtaagcagcaccagccttgatgatagccagcagtgtcaccatcatctcaatagaacgtggtaaacagaccataacacgctgttctgggcctatttgccgtgataccagatagtgtgccagttggttagcacgttggttcaataccgtataactaatattctcctgttgataagtcagcgccacactatccggcatggcaattgctcgttgttcaaagcgcgaggtcagtgtttcctcatttaatacggtgcgccgtgcaggcaataggctgtctcctatgtgccaatctggcaatgtcagctcaccaatggggcgtgatatatccgccagcaattcagtgatgaaatgctgaaaaagagatttttgcaggttaatatcgtggggagtgtagaggttatcattggtatcgagcgtaaactgcaagctgtcgccttcgccatgatcataaatggtcacagtgaggtcttctaccggcccactggacaaatttttggtacgcccaaaattacccgcaaagctcacattgctgttaaacagcatcacattgatattctgcgcaaacaagcggggagcagaaccatttcgctgtaaatcacgatagatatcttcagaacgatactgttgatgtttgagtaactggcggatttcttggctgaccagcttactaatgtcaccgatggaatgagcaggatctattgtcaggcgtagaggtaatacattcgatatcatacctggaatactacgtaacgcacgccctgaacgcgcagtgactggcatacctaaagtaatatcctgcttatcggtcatacgagaaatccaggaagcaacgatagcaataataatttgtgccatactacttccactctcttcactcagagtacgcaggatatccttgaccttggccgggatttcacacggggtgcaactgaacgaacccaagtcggcaaactgaccgggcttcgctcccacggcaaggctctgtggctcacttcggcctaccatatattgtgaccaccactgacggtcatgttgaaaattttccgagcgacggtactcttcatcaaaagccaacagatcgctaagaggtccgaaaggattttccagctcagcagcgccagtcaatttctgggtatacagttcagcaagccgctgaatcagcaacgtagtgccaaaagcatcactagccagatgatggacacgaataaacagaaaatagtgttcatcactgatttttagcagcgcaagaccaaacaacggccctagggttaacgccatcggccgcaccaattcagcattcatccaggtttcagcttctattaacgcatcttcatggtgagataaatcaataagtgggcatttccattgcaggttggtaacaatctgttgttgtggtccttgtgggtgttgcacaacgactactcgtaaacattcagcttcatctatcaattgggacaacgccgtgttaagtgtctcaatatcgatagcacctgaaatatcaatataacaaccagtgttataaattcctgtgcttacatttaattgttcagccagccaaatttcctgctgtgctgcggtcagggggtaatagcttccttgatgttgtttcataattaatcctcacaggctggtgatatttttatttatataaattgcgtaatgtgatgtctgcctgagaaccacgcagcaaaatcaatatggcgcagaggcaaacaacgacagcaataacaaagggaattccttgaaaatagagagattgctcctgacgagatgaaaaatgcagtaataatgcacctaacaggggtgaagcagtgatagccagacctaacatacagttctgcgctcccagatattccccttgtcgctcattgccggcacgcaatgaaatcaaagcacgaagcgttgaatcgctgatcaacgccagtgcatgcagagcaattgcaccagcaacaatcagtggtgataccgccaggctataagcgataaatgctaacgtatagagtccgtaaccgatgatcgctgtgcggtattcgttacaacgcgccacgaacatttttagcaaccaagtttgcgttatgatgatcccgacgccgagtccggtgagagccagcccgttttcacgtggtccccagcccaaacgcatttcattgagtaagacaaaacaggccagaaaaatgccataagccaccatgccaagagctgaagcataaaccagtcgtcttaataccccatccgtcgccagtagtttcaggctgcccaaagggttggcacggtgccagtcgaacgaacgccggttctccttggtcagactttcgttcagaacgaacatagcggcaatagcgttcacggcggccagtgagccagcaatcacaaacggaaggcgcggtgcaatcatgcccaataaccctccgaaggctggcccggcaaccatgccgaagccaagaacaccgctgaccagaccgaaacgtgcggcccgctgtgcttctggtgtcacatctgctacgtaagccgatgccgcggaagtactggcggcggtggagcctgaaagaaatataccggctaccagccatcctagtgacggtgctgtcgccaccagcgcatagctcagcgctgtgccaaacagggttgcaagcaataccggccgcctgccccaagcgtcgctaagcgcccctaacaacggggcgaaaaggaactgtgcaaaagcatatagtgagacaaataacccgattaacggcatacccgcttccggtggttgcggggcaacctcccgcaacagatcgggtaaaaccgggagtacaatcccgatacccaaagcatccacagccaatgtcattaggatcacggccaatcggcgtttatgttggcggttttcaggaaggtgaaccgttggggaagaatcactcatatctgtcctcctgttattattgatggaaagtgatggattatcgcccgcgatacatgtgctacgtgctcttccatcaggcagctataatgattccccggcacttctgcgatacgaatgggaagagtggagaacttttcccaaccccagccattggtctcccggatctccggtacaacaacccctttcggtagggggtctaccgcttttactaacagcataggaattggcaactgtacgggtattggtcgatatttcggtgacatatccgacgcagcccgatagacattgaacaatccgttaattgagcccatatcattctgtgcctgaatcaacgagaaacgttttagctgctctttgatatagctcagtaacgcctcacgtggtaatgcacgcatttcgttgtcatccaagctgtcgatcatctccagtcggttagtgtagtaggcaaaaataccaagaataactttggcaatatcagcatcttcctgatatggaaccggtgcatagggtggtgcggcagagtcgagtagcaccagagaaccgatgctttctccctcagcatgaagctgccgtgccatttcataagctactttgccccccaatgaatgaccgccgatatgatatggcccctgtttttgagccgagcgcaaacaggcaatataatgtgttgctatctcttccaccgattggtgcggcgcagtttttccatcaagccccaaatactgcataccgataaatggcagttctggtggtaatgccccggctaggggcataaattgggtaacattgccgcccatacccggcacacaaaagaagggtgaataattaccgttaccgccgtgattaattggcaccaggcaatagcggatatgggcattctcaggaaccgagctctttttctcgtcagatagtgaacggacaacacgtgccattgtcggttgttcgagaaactccgccagcgtcaggcagtgctggaaatgatcacgcaaacgggagatcatctgcgttgccaacagtgaatgaccgcccagttcgaagaaatcatcttccaagtgaatcgtctcttcgcccagtagctcataccacaattgacgaaccgcttcctctgggctggcggaatcagatatcactgataaatcctgtaattgtgtgcgctgaacagggggaaatttattgacaacgatctgtgcttccattccagcgatcgccagatcgaaaatagcgcagccctcttgattactgagaccgatcacgctttcttgacggcgtgcagcataatccacggccatccccacttctgcccaggtatcccagttaactgacgttaccggtatagcctgctgtcgccaatagtgcgccacggcatcaagataacggttcgccgccgcgtagtctgcctgacccattccacctaccaatgaggcaagtgaagagcacaacagaacaaagtcgagagggtcctgacttatcgccgtcatcaattgctgtgtaccacttacttttgctgccatcacatgccgccagtcctgcgacgtgccatgctccagcaatccactggcttcaatacccgctgaatgaatcacaccgttgatagcaccaaatcttgcccgcatctgtgccagtgctttagtcaatgccgcatcatcagcaacatcagcgcgtaacatcatgacttcagcaccagatttctgtaacacatcgagtaaagcttcacttaccgcattagttcctcggcggctcaaaataccgagtttaaccttactgcattgattgctgatgtgacgtgccagtaactgaccgataccccccaatccacccgtaatcaggtaaacaccgccatcccgcagaatttgccgacgaggtatctcatcaagctcagtaaatgtctgtaattcacgttcaccctgtttaagcgaaatgctggtaaccggtattccttctgtcgtctcttccggttgcatatccgtatacagttccgcaatcagcgattgatatgtagcaaaagtgtcatcatttagatcgatatgacgtgcagaacatcccggatactcggccgccaatattccgagcaaaccaagcgcgggtgcggcattacaggcttctagcactttggctgcctgtagcccgcgggaaatcagggtaatattaaaaactctgtgatgaccggtaagtgctttaattgcagccgccagttgttcaaatgcagcctctggttgagaaatccccgccgcagtccagcaccagatgatacgttctggtagcacttgttgctgtatcaggcaatctatcagtcgttgataatcttcgggctggtccttacgcaaactaaagcggtaggtactctgttgcagaaattcatcagcatcttcaacaacgatactaccgggtgccgccgcttgcgataaatcacttagctcagcggcttgggcaccaaaaatcaaccacggcgcacgattctgttttgcttcgcctagaggcttcggtaaccatcgagggtaacgacaccaccgtgctacattcgactcgctggctggctggaatggtaaggaattgaactgtcgtaaattgtaaccgtggatttcagccagcacctgtttgcaattttgacgctcatcccaactaaatagcgttatgtcataagtccgaggtgccgtttcaaccgccagactgtaaaattcggcgcataatggttggtgcagcgtcagcgaaccgtaatggaacggtattgaagcatcacccggcaacagacaggcatgtaagaacaccgtgcccaagtcgagcaaagccggatgtaatgcaatatccggcaaatcatcgataaatgcctgattgagtcgcaactgtgccagcgcacagcgatcccccatccatacacctgcaatgcattgccagcgtggtccatagtcagcaaatgcttgattgaaacgctccggtgcctctgcaacctcttcaagctgcaaattccgacgcaactcataaggtgaaacaatttctgctggtggagagcatacggcagtaacattgccgtttgcatggagttgccacatgtcattaccatcgtcgtgagactccagcgtaaaggccaggctgttatcaatggcagtcaaactgatgcgtatctgacgttcaacacctgacgatagtaccaacggtgaggggaagtaaacttcactgaaagtagctgtgccaccgggttgcaattcgttgaaaacacgacgcactaattccaggcaacctgtacccggcaatacaccttgcccttcgaagatgcgatgttcatcgataaaccagacattatcatctagcttacaagtaaaccgggtgattccctctttatctgatgaccgtgtgaaagtcggtagttttctccgctgtgtactgatgacggtggctgatgtagtgacaggctgttccagccagagatgttgtcgttggagagggtacactggcagcataacccgatgtaatttgtgtgaatgaccaaatgcagcccaatcgatagcaactccttgctgccataactgcccaacggtattgagcagcacctcttcatccggtttttgctggcgagtatggcgcatcgtggttagtatctgggcttggcctgtttgctgtagatctttcagcatactggtcagtgcacgccctggaccgacttcaagcaggatcggattgtcataatggttcagtaacgtaagaataccgtcatagaagcgtactggccgacgcagatgatctccccaataaccagaattatcgcgatcttgttcactgaaccaacggccactgatattggatatcatcggaatggtactggattgtagcgtgaagcctgcgctgaattcccgcatctgttgtgcggcagcatccatcaatgaactatgaaatgcatgtgatgtcgttagtcgctggcaagaaatacctgccttgttgcattgttcttccagtaccgcaatattgtcatggctgccagttatcacgcactgtgcgggcccgttgagtgctgcaaattcacactccggtgccagcgcaaccatacgttcagatgatgcctgtaccgccagcattgctcctgtgggctggcgctgcatgattgccgctcgatttgctaccaatgccagtgtatcttccagttcaagcataccccctacacaggccgcaaccagttcaccgaggctatgaccaatcattgcttgcggtgtaataccccaagcttgtagctggcaggccagcgcatactcaacagtgaacagcgcaggttgggtataacgtgtagcatttaaccggctgatagcattgtcgcgctccgattgcggataaatcaactgcctgatatccagtttgatgtgtggctgtagcagttcggcacagcgatcaaattgctggcggaatacaccatcacgcagatagagcgattgccccatttcaatagactgactgccttgtcccggaaacataaaaatcaccgcacgaggctgttgtttgcgattaatcgtctgcggtgatagttggcgtagttgattgattaattgctcccgatcttttcccacaacaaaagcacgctcactgaaagcgctgcgtccttgttgcaaagttccggcaatatccgctaatagctcattaccggtagtcaatgctactgccaagcgttccccttgctgaagcaacgtttgcggcgttttcgctgaaattggcagcagatgccagcgctcgtcatctaatatacgggcatcttgctggcgcggagcttcttccagaataaggtgcgcattactgccgccaatgccgaaagaacttacaccggcacgacgtggctgacttgtctgcggccacgggcatgctgtattgatcacagaaaacggggtctgttcgaaggggattgcaggattgggttgatgatagtgaatacttggtggcaaagtctggtgacgcagcgccaacacggttttgattacccccgctataccggcagcagcatcaatatgtcctatatttcctttcacagaacctattgcgcagctccctacaggtagcacttcaccatcagattgttccaggaaagcctgagtcagcgcacgtatttctactggatcgcctaaagaagtcgccgtaccgtgtgcttcgatataactgatgctggcaggcgataccccggcattacgcagcgcgtctttgatcactgaagattggccgtcaatacttggtgctgtgtaactcaccttttgtgcaccatcattattgatagcagaacctttaattaccgcatggatggtatcgccatcttgcaaagcagcggacagacgtttcagtaatatcatcccaccgccgctgccgctggctgtaccgttggccgcagcgtcaaatggccgacaaaggccatctggagacataattccaccactgacatggacaaagccaacctgttgcggatcgagtgctacagcgcctgccaatgccatgtcacattcaccacgtcgtaggctttcgcaggcaaagtgaatagcggtgagtgatgacgaacaggcggtgccaatactgacagacggtccgctaaggttcagtttgtaagcggcacgtgtagcgataaaatccttgtcattacctatttgccactgaccggggtcgaggtgcatccggtctttatttggcatgacgttttccagcaggtaataattgaagccactgctaccaaagacaccgactgaacgcggtgtactatcattgccatagccagagagttccaacgtttcccatgccatttcaagaaataaccgctgttgtgggtccatcacctgcgcttcacgtgatgaataaccaaagaagcgtgcatcaaactccgcacaaccctccagcaaacgtgcgcgtctgacaaactgtgggtgacttaacagcgctggattgacgccccgttgtaacaattcctcgtcagacaactccacactggcatcgtaacccgccaacaaccgctgccaaaaagtgtcgagatctggcgcttgtgggaagcggccagtcataccaataatcgcaatagcattgctatcctgagtcgaaacatccaacattggtattgctgttggtattgctctcttttcagtgactatcagcggtgtgactgcgactgtaacgggtgttttttgttgcgacagcgtgtccagtagttgcgcctgttgtcgaatggtgggatgggcgaaaatatcggtcacagacaagttgacaccaaacgcttcattcaattgctggaatagcgccataacccgtagtgagtggccgccagcatcgaaaaagttttcgtcataaccgatttcatccctctctagcagttcacgccagatagcctcaacgcgactgagtgatgacacaactttggctggcaaaggagaagattgatgctgaccggcacgtgtcagtttcatttcagctaatgctttcagatcgacttttcccgtaatgccggtaggcagtgcatcaagaaagaacaacgctgttggcaccatcacctcactaacctgttggcgtaatgcgctcaggatctcactacggctggtttcgccgacaatgtatcccgccaactctttattcccttggctatcggtgatcgccagtgcttcggcctgacgtacacccggtagcgcacttagggcagcacgcacagcattcagctcaattcggtaaccacggatttttacctgacggtcaacccgaccaataaactccagtgcgccatccatgcgttgacgcacaatgtcgccggtacggtacatgcgagcctttaattgtggtgcaaagctatcgggtaaaaacaccccagcggttttttcatccatacccagatagccctgtgcaacacaggttcccgctaaataaagttcacccatttcccccggtgctacgggctttctctgttcatcaagcagatggaagcgaacatcgcccattggacgcagcaccagattttgccctgcggcatgataatcggtaagggataccacaattgcgcattcagtagggccgtatccattcatcagcctgcgccctacagaccagcgctgggcgacttcgggcatacaaggctcaccggttacgataatcacctggagacttggcagcggtactaacggcactatcgccaacgcagaagggacaatccacatatgcgtaatctgtttatgtgccagccactctgtcagattactgccaggcaacagttgctgtttattagcgaagaccacgcaagcacccgctacaagtgctggaaaaatttctcccaacatcacatcaaatacgggcgaggagtactgcactatgcgagaagaaggttcaagcctcagctcatcgcggattgccagaatgttatggcagacactgcggtgggtgacagcaacaccttttggtttacccgttgatccagaagtgtaaataacgtaagcgcaatcatccggctgacagatcgccgccatagtcatataaggtgcattggctatatctaactcatcgatattcattgccgccagactaagacgctgacacagaggcgctgtttcatttcggcacaatatcgcttttatttccgcattatcaatcacatatcgatttgctggttcggcgttatcaggagccagtggcacaaacaccgcaccaattcggttaattgccagcattgccgtgacattatgtggatggtgtcccatcagaatgccaactcgatcacctcggcctacacctacttgttgtaattgttgcgccacatatgcggtcaatgtatcaagctgctgataacttagacttaattcatcactttccagcgccacatgtccgccataccgggacaggttctgttgaaacaactgaaacagtccttgtggcttatcaacaacgagttctggttgagcactacggtcagaattaaccgtcaacaaatcagccaatgcagtatctggtttttcaatgagttgtggcaacatcgccagcaaatactcactcatccgtcccagagtgacggcagataacccccccggcatggccataaaatgagcgtaaacctgaccatttacacgattaattgccagctctaaatcaattttggcgcgatagtcccccaactcaacgtctgaaaccttcatgtccccgaatgttgcatcgtttggttgatccagttcacaggaaaaaatagtttggaaaacgggatttttacctgccacacgcggcaaattaagtgtttgtaccaaataatcgaacggcaaatcacgattttcaagaatgtcgagactaacctgtcgcgtgtgcatcaggagttgctgaaaagtttgcaactcacggctattgatacgtaccggcaaagtgttagcaaagtagccaattagcgtatcccatgcaggtatagtgcgcagcgacactggtgtgccgacgataagatcctgctccccactctgctggcgcaacaggagggcaaacaaactcaaccagaccataaacggtgtacagttttgctcacgagccagtttctctacaccttcaacatacacatgaggaatagcacaacttattgcagccgcttcgtcagttggtgccgccatctcattcagtatcagagtcgctggcgcatccgccaattgttgacgccagaaatgaatctgttgctgcaccgctggatcagtcagtcgggagcgctgccagctaatgaaatgcccatagtttgcttccaacatgggtagcatgggtgccttaccggccagacgtgcctgatagccgtgccgtaactcatcaaaaagtattgccagtgagcgaccatcggaaataatgtggtgcagagtaatacaaagcacatgctcttgcggggacagcgtaaacagtaccgcacggatgagtggcccattgacgagatcgaaacttgccatcatctcttcccgcaatttcgatgccagtgcagactcaccgccggagatattttgctggcgcagggttagcgttaattcagacgcaacctgatgactaggttcaaaactggatgttccatctggctcgcttactttgctgacttggctagagaatgtggtacgtaatacgtcatgacgttgcactatgtcattcagcgcctgcattaacgcagtaaaatgcagattaccatgcagacgcaatgtgaaaggcacgttgtaactgcaatcatccggtcgttgcatcgcaatcaaccacaaactgcgttgaccgaatgagagtaaatcactgacctgcgaaacgtgctgcacagtaacactctgtttcgcattgctcttttcaacgccgtccttttcaatactgttcttttcaatactatctttttcaacactgcccagtaacgaggctaacccgacgatagttggatggttgaaaatagcggaaagtttaagctgaacactaaatgtcttattgatctgcgtaatcagattggcagcaattaatgaattaccaccacaatagaagaaattatcttcagtactgatgacctgaactcctaacgctgttctccataatgccagcaattgttcttcacgggcgttagccggttctgtcatagactcctgattttctggtagtgagaaatccggaacttgtaagcgcttgcgatcaaccttcccgttgggggtggttggtaatttatcgagaaacacgaaagcacgcggcatcatatgcccgggtagccgcagggacaaataaccacgtaacttgtcagtatcagccgatgacacaacataggcgaccaacactttattatttgtactgtcattacaggcgacaactgcacactggcgcacatcggcgtgctccagtaatgcactctccacctcgcctaattcaacgcgaaaaccgcgaattttaatctgatgatcactgcgtcccatgaaatcaatagtgccgtcagccaggaaacagcaaatgtctgaggtgcgatagaatcgcgtactgctattctctgctacaaggccgtctgccacaaaacggccatggctatcgaatttgccggtaataaatttttctgccgtgagttggggattattgagatatccttttgctacggtaacacccgcaatcaacaattcaccactaacgccaatcggcacttgttgcaggtgtttatcaacaatgaacaactcacagctagccagcggcctacccaatggaatgactcgcccggtttccaatggatgtgtttccggatcaaaaacagtgctatcaatggttgcttcagttacaccgtaagaacccagaatacgcgcatccgggcggcacagcgcttgtgctgcatgcagctcatgaccgaaccagacatcagccccacacaccagtgttgataatccatccagacgtttcccattatcctgacagaactgaattaattgacgtagtaccacgggaggaaaatcaccgaaggtcacgccttcgctcatcattaagcggtgcatttcaggggcatccagcaaccactcacgcggacacataaccaagcatccaccacagcccagagtacgactgaaatcccctatactgagatcgaaaatcggtgccgcaagttgtagtgataccggctcaccgggttgggtgaaacgatagtcatggcaccaagcatggtacgatgcatgcagactaccgtggcttacctccaccccttttggattgccggttgaaccagaagtgtaaataacataggctgaatcactctcctgaactggccaaatgggttgcacatccggcggcgcgggttgacgaaacagctcatcaacgtccagcataatggcacgaaaatcaagcaaaccaacagcatcctgttcactggtgaggatcagtactggttgtgcatcatttatcttatcggcgaagcgaggatcagaaggggacaacggcacataaaccgcaccggcagagagaatagcgtaaaaagagatgacaatttctggccggtagctcatcaatactgcaacccggctacccggcccaacgccacactggcgcatcttcgcgagcaggtattgcgcgtactcgtccagttgcgcataggtgaaacgttgatcacgccacaccatagcccgtgcatctggatgattacgcacttgtgacttgatgcgttcagctaccgaaataaattccaataccggcagaggttctgccggccgggagaagcgagctagtgtttccagctcttctggcggtaacatgctacatttggcgacagaacgctcaggttcacttagcaatgcatccaacaatgtctcatagtgattcaccatgcgagtaatggtgaggttatcaaacaaatcggtatcaaattcaaccagacagagtagtgaacttggggattcttctatcgataacgttaaatcatatttagcagtaccagaatggataaattgtacttctgctgctaacccatccagttgcaatgcttgtcccggactcttcaaataatcaaacataatctgaaaaacaggggaatggctcagagaacgcaggggttgtaccacatcgacaatctcatcaaacggcaaatcagcattttcatatgcatcaagtaatatatcgcgtgcttggaccaatagatcactgaaacttatcccttcattaacgcgaaaacgcaacggtaacaaattgataaaaaagccaaggcggacatgttcatcaatattgtgacgattcgcaaatggactgccaataacgatgtcgtcatcgtgtgaataacgattcagtaataccgtaaaagcggaaatcgccaccatataaggtgtcaatccataacgttggcagattttagaaatacgtccaacgagagataaaggaagtgacttatgatataccgcgccacgtccccgttgttccaagagtcgtggccgatcggtaggtaatttatgcagttcaggcaattccactaactgttttccccaatagttgcgtaagcgttgccgatgagcgctatttatatgaatatctgttatagaatcattgacatgcgggtaggtaatcgtcgccaacttaggctgttgacctactttatactggttataggcatggctaaaatcattaagaaaaacgtgagtagaccaatcatcaaatacaatgtggtgcagcgtaaatattaactgatgatcgttctcttgccgacgaagcagtaaataacgaaaaggcaaatcgttactgagattaaaacaatatctgacttcattatcacagattgactgtattttggtttcgcgttcctccggggaataatcgctgagatcactgatacgtaattcaggccactgcggattcagtactatctgtaattctccattgacaacatgaaattgtgaacgcaataccggatgacgctcaatcataaaaataatcgttttttcaagtgcttctctatctaacgtaccacgcaaacgtagcgaaaatggcacgttatataatgctgagtccatatttccttggctaataagccatagcctgcgttgagccggcgttggcaataagaatggaacattcgataaggtgtttgaataattactcacgaaatttttcctaagataaaaagatttttgcagcttagtgattgccgtaaaagctatcactcctgggtgtcagccactttcatggcaaaagcgctactgggaacacctgtcaatctgttctagtggggtgaaatcaatcagaatgatagtgcggacgccaacgctagcgttttcatcgcaagttacgggattgatgtaatgacaaatcgctgcatcatcgatgatgtagctatcaaggggatcattaaggagaaaacgagttatctcatgagcagggacttcttcaagctggcaattcgcataagaaggtggcgcgatatgcgttgtaccaccttcgatattgtaacgttcaattaaatgtacagcggtgaacggctgaccgtcacgatgaaaacagttaggcgtaatttttgccggtttacccggtagtgcctgcattcggatcagatgtacaccacatagcaaacgggaataatgttctgccatgccggttagactcagatcgtgccaaatgagtttattaagtagccctttattaagtatctcatcaggcatacgcaggaattttcgtaccacaccaccaaattcaggttgatattcacttccctgatgataatcaatctctatactaccatcagattgctgatgacctgttttccaatcaatagtttctgtttcacggtgccacactccctcacaataactgcggtgacgaccaccttcaccaaatcgatctaacggcagtgacttagataattcacacagagagataagatcgattttttcactgtcagaaaggtcaagatcggtggcattgaaagtggcaaaaccttgttggtgcaagctgttgcggatatgtgtggaagtaagatggtaactatctggtgcgttaataaatatattccagcccattgtaatatctctttattagggtgaattacgatgacatcgtattaaattaattacgatatcttgggaaaaaacagttaatactgattaactcaaaaaattatttagttatatccgtcatctttcaagttgcttctttgttggctgcactcactcaccccggtcacatagttttctatgctccaggggattcgctcccttgccgccgcgatgcatcttgaaatccatagggtatatatttaatgattttaaaaaacacctataaataagaatatctcgatttagcatagaacaacactgccatgctttttgtcgatctacaaagtcaatcaatcaatttctgacaaatcagatagtaaaggatattgctggataagtaagagagctaactttaaataaataggctattaaaaaaacctactatattatagcaactgttttttgagggaattaatgacctcaatagtattacctttcttgccgggtgaaacaatatatacccgtcatctttcaagttgcctctttgttggctgcactcactcacccccttgcggtcgcgatgcatcttgaaatccattgggtatataagcagtccaataataaaaatatgttcactaaaattaaataaaaaatagaacgcaaagtatacaatgtcaactcgggtctttatttttaatttggcaaaaaaaatttacatataaagaggtattagaatatgatattaatcttaattgattttaactttggtatatcatcaaccgcttttattgattcgaccaaaattgctgtttgtcacaacctctatattccccgtcatagagtatttgagggagttgagcagcgaggaaaaacgagtacgggctggtttttatggctttttaaacgaaaccgaggttaattaagacaaagtgccggataaaaaccagcactttgtcaataatctgagtccgcagagcgggctttcttccttaaaggtggaaagctatgcgtttacctgttggaagagtcacctcaaggcggcttattagtttgcaattagaagagatatttaaatctggcacgtgcaccgtagcgtcggtcattattactgttggcaattttgttgctatcatttgcctccaacatagagacgtaggccccaagatagagattaaaattcttcatattcatgatactaggaatctgatatgacatatggatggtatttatatcgtatttacccggctcattgaatgggtgattaatatatgcggttgtatcgtcagtattgaacgctttgatattgttatgggcatagacataacccagttcgaaacgatgccacatcacattaattccggtagtgaaattgtgttcatctgaggcatccagataagcggtattcaggttagcgacaatgccatcatcaggatcggcctccaggccgttccagcttaatgtcataccgtaaccattgcgtctggattgatcgacccattgcccttgattattctggtagccataggcgttattgacgacattactctccatcgctatggctgcactaaactgatcttttttccaggctgctaccgggcgcaaataggcgacattttttttattttccagtgtgttgccgtggtaagtgttatctcggaatagtgaagtgccatcttcaagtagagtattgagttcgaaataccagttacctgcgtatttgctcagcatcaagttaccaccgctattactgcggccacgtccttctttcatcatgtagatatagccgaaaccgtcggcatacaaatcgttggcagtattaccagaatactgaataaaagtatcttggttgagtgggaacatatcgtaagcttcaaaacgcccgatttttacctgccagtttttctcattgccgaagaagaaagcggcgtcgtcgagattcattttgccagtcatgtctgctaatggttgcactctaaagccggcaaagttgttgttttgatcacggtggtaaccgtccagcccgatcaaaatgcggccattaacattccaacgctctttgtcgccaggtttccagtctttattatcgctggttttaagtgaagtaagctgaccggttcggctggcgctatcgagattgaattctacatcgccatacaattttagatcgccaaaatcattcaatttcaagttgctggttgatggagcactattttcctgcgaagtggggtgttgtgctacttgtgtggtctgttgtttggtttcgatagcgcgttgttctagttgctgtgcgtgttgctcggcggcagtggcgcgcgcttccgcttgggcggctcgttgttctgcttgttgtagtcgctgctccagtgcatcaaggcgtgcttcgatgctattagcaggtgaagcaaggactgaggccgaaagcattaatcctggtgtgacaatcagatagcgaaggttcttcatgatactgtactctttaggatattagttattatatcgtagctaaattatcaagctggtttttttggattaaaagataattgagttgattggcagatcgcaatcaagtcgactaaccagataaaactattgtgatcgaatacgcaaatttgacatgaacgataagtaacagtggaatggatgaccaccaccgagtgttcaggtttgcatttgcaagatcaacaggaatgattggcatggtgcgaaagtgctggagctgtttgtcaatgttaaaccaagggggttgtcaaagccgttgttatttgaaatgagagaaaatatctgaaataggaataattgcatgaattaatcatttttcgaagtatgaaaatgatctattttattctatatttatcgaaataatttatagagataagttcattaaaatcaatcttttggaaattatattttatcttatcatttttttaatttactatttgaatgattggtaatatattcaaaaacctataaaatatatttttatataccttatggatttcaagatggatcgcgacggcaagggagtgaatccccgggagtcgggagtatagataactatgtgaccggggtgaccggggtgagcgagtgtagccaacaaagaagcaacttgaaagataacggatatatgttgatatcctactaattgcattatattatcagcgctgtttgggatgataacttcataataatcatatagttaaattttttgctgccctttttgtgatcattcccgcattactacagttttttttatgataaaacataagagataataagctaaatttgtataaaatatcaggattgatgttggatgatttcatcaattcagctttatctattgtttgatatgaggaggtcattattgatattcatcacaaaacataatgaattctaatgtgagcataaagtctcaagttcgattgatataatacgtgttattattgaggctatgtcttggttaaacataaaaatacctaatgaagagcttgtcgaaaaaatctgattatcaaaataatttagcaaagtaatgaattattcctatgtcttatcattgcagggctcaaagatataggtaagaacctgttttttaattgtattgtgattattcgtattgtgattatattgtattgtaatcatggaaatgccggcgcttgttggtcctactcttaacgaatggctgttgttcatcggttggagttttttaaatggtgtcacattatgttcaggacaatgctaaaaatttagggaataccatgacagccgaaaccatttatggttatggagataatttttccccccatgttagatgtatataccctatggatttcaagatgcatcgcgacggcaagggagcgaaccccaggagcatagataactatgtggccggggtgagtgagtgcagccaacaaagaggcaacttgaaagatgacgggtataaacgtaattaaaaattgtggccgtatatctctatcttttgcaattcgtgtaggtaataaccctacattcacttctttatcgggatctatagtctctcaagtaatcatgaacgggactaccccgtgttcgcttttttatcaagcattaagcgcaataacgacaactaccacgttaactatttgtgaggaaaaagagagtgatagacgtacagatcaatgaagtacctcttaaggaacacagcccttcaattaatgattgtttggatgagcaaaagttactttatgacatgctgctgtcacgggaatttgataatcgtagtgcgatagtcacacgacaaggccgagcttggtttcatgtgtcggctgctggacatgaagggttggctgtgttgcctcagcttatggaaaaaaatgatgtactggttccttactatcgtgatcgggcgttagtattagcgcgtggtatgtctattgttgaaatgacaagggaacttatgggtaaggccacttctcactcggccggccgaaccatgtcgaatcatttctgctccaaagagcataatatcttctcggtagtcagcttgaccggaacccaatgtattcccgcggctggcgctgcttgggcaagcgtgttggacaataaaaatgggcttgttgtgtgtggtgtcggcgatgcggcaactcggcagggagaattttatgaagcggtcagctttgcggttgaaaagcgtttgccagtcgtctttgtggtttccgataataaattgggtattagtacctcaacggagaagatggctccgtatcgattgggaatatttaacgagtgtttgatccgtcgtgttgatgcccgtaagccggaaactttgtttactgttgcacaggaggtattcaataaggcgcgatttgagcggactccctgcatattggtttgtcgtatggatcggttagattctcactccaattcagattctcacaaactgtaccgtaccccggatgagctggaggtactacaggaccctattgaaaattacgtcgcttatttaaaggaaaaaggagcgattaccgagcaagctctggctgaacaaaaagagcgcattaaagcggatgtcgcggaaatatttgagcgtgtttaccacgaagaagagcctgatcctgcaagtgtcagtacctatttatgcaatcgtgaagggacgcctaccgtacatgttgagatggaagccgaagagacacaggtcaaagcggtaaatcaagttttggacgaggcattgagtcagcatccgaatgtgctgatatttggtgaggatattgaagatcctaaaggtggtgtttttggtttcacccgtggcttatccactcgctatcctgatcgcgttattaatgctcccctttccgaagccacgattattggctcgtctgttgggttatctgccagtggttggcgtccgattgttgaactgcaatttattgactttgttgggctaggtctcaatcagttacagtcacaacttggcactttaagttggagaacggtgggaaaatggcgctgtccggtggtgatatatgctccttatggcgcttatctccctggcggtggtatatggcacagccaaagctcggacggtatcctggcgcatattcccggtattaacgttctggttccaacgacaccggctgataccgtcgcgttgttccgtaccgcgttaagtctggacatgccgagtctgattctgatccctaaacaccttatgagagagcgccatgaacgccggctggtgagtccagtgtcgcttgggcaggcaaaaatatcgtcagggcaggaaaggacattacactggttgcttggggaaatacgactcagcttgcgacgatggcggctcttcaggcggaaaaagacaatattgacattgaagtgattgaattacgtagtctggtaccttgggataaacaacggattgcggaatctttacgcaaaaccgggcggcttatcgttgtgcaggaggatacccggacggccagtgttggtgcatccattattgctgatattttggatgagaatgacaatttcttctctttattggcacctccgcgtttggtgacgcgtgaagatattcatattccttttaatccttgtttagagaaagctgttttacccggcacggatgacattttagcctccgtctatgcggtaatgagctaaggagaacttatggcacagttgcttattcccccgatgggagaaggaaccactgaagtcgtcatcatccaattacttaagcaggtaggggatcatgtcaaacgtgatgaacctgtttatgaaatggagacggataaggctgcctttaccattgaatctgatgttgaggggatcttggaaaaatggttggcggcggaaaatgatattatccctgttggatctcctattgccgttatcagagctgttggcgagatggcagagccttcccctgtcagtgaagcgttaacgcctccgccggagaaaatggagagagtggcggaggatgtcgaaaaaatagagaaagtggaggcggctcctgaagtctccgctcctcctgcgcgtattccgccaaaaacccgtcagtacgcacaagagcaccaaattgagccactcattcttagtcaactggcggaaaaacatggcacattattgcctggtcatatagatgattacctccagcagcaccgcgaaactaagatatcagaagaaaccaggccatcagaaaagagcaatacagaaaatgacaatgtgggttttctgtccagagatcagcagcgtcttaatcgtgcaatacggttaaatagtgctgcggtacaaccttgttgggcagctaaaccactaccgattgagcttgttgataacgccattcatcatttaacggaaacctccgggcagcaggagtggataacgccatttcaggtcatcacttatgcgatttctcaggcgttgaaaaaattcccgatgttgcgttcgagaccgcttgatcaggagcgttatcacacttatacggatatcaacttgggtattgcttttctggatgagaaaggcgatttgagttcattaaaagtaccgaacacgcagaccatgagcttttttgagttcaggcaacacttgaatggtgtacttgatcccgatgcggaaaaactgcctgttgatattgatgttcctatgatgatctcctataccggcaacgatggtgctacctttgccgtacctgttattgtgccgccatctcagtcaacattgttcattggtgcgcctcacaacaaagagatgagcctcgttctggcctttaatcactatctgctcaatggggtagaggcatctgagtttatttccgagattattgttcaggttcgtgctctgtctgggccacgatctgccgcacatcagatagaaggtaaagtaggtaaatcggtttccgggcaattacgcacgttgctggcggatttcctgcattgggacgaagattttactgaatcaatgatgccgcgcacttgggctgatttgggcattgattcgctcaaggcagtaaagcttgcagagttaatgtcagtgcattttcgtcggaaattatcgccgacgctgttctggcgttatagttcaccgcatcgattgattgaatatcttgacactgccaaaactgaactgactgagaacaaacattccttagatgactttattaatgcgatgcgtggtcttgatggcgaagcagcattaaggttacagcgcctcatagaaggaggaaagcatggataatctgcaccacatatatcattcgcttagtccggatgaacaacggatagctaaatctgccttgttggaacatttaagttccattactccctcagtaagtagtgcgggtgataccaaacagatgcctattgctattgtgggcatggctttccgactgcctggagcggaagattccccagagcaaatgtgggagatcttaagatctggacacagtgtaataaaagagattcccgagcagcggtttgcatccgggaaaccttacgtcattccattgccgaaaaaagccttaaaagccgggttgctcgatagtattgatggttttgatgcgccattctttggtatttctccgcgagttgcggccatgatggatccgcaacagagaatgctattagagctgacttggcaagcgatcgaagatagtggtgcgaatccgcttggctattcaggatcaaagacgggtgtttttattggctcgtgcagtaatgattatcgtgaactggttgcggccgatatggcgatggcaaatgcttatgcgccgacagggacactgaattgcctcttggctaacagattgtcattttattacaactttattggcccaagtttgcaaattgataccgcgtgttcaagtggattgacggcactgactcaagcggtgaattcattgcgttctggggaatgccaacaggcgatagttggcagcgttaacttattgagcaacacattcaacatggctgcttattaccgggcggggatgttatctaaagatggctgttgtagggtttttgacgcggatgctaatggttttgtccgtggtgaaggggctatctgtctattcttgaaaacgcaaaaacaggcattagaggatcgggatccgatttatggatacgttcgggcatcggcggttaatcatggtggacgtgctaattcactgacttcacctaaccctgagcagcaaattgcgttggttaaagattgcttgctacaggctggaatttctgcggaacaaatcagttaccttgaagcacatggaacgggaacctcgttgggtgatcctatagaatttaatgcgcttaatgaggtctttaatcgcgatgaatcaggaggaacgctacaaccttgctatattggttcagtaaaagccaacattgggcatttagaaggcgctgcggggttagctggcatcgttaaagttttattaatgttgcagcataaatctattgtacctagcgctgcgtttcagcgtttgaatcctgaaattgatagtgtggattcacgtttacaactggctacagaggaaaattcttggcgagtgggggcagggcaaaagcgtttcgctggactcagctcttttggattggggggcagcaattcccatgtcattttagaggaggcaccaacccaagcgcagcaacagattaaagccaacctggaggggtattattatcccatctcggctaatagccaggcatcgttacaaaaaatagtggctatgctaggggattttatcgagaatgatgaaagcgttgaactaccagcggttagctggacattacagtttggcagggcagcgttatcctatcgggcactgttcgttgcaacatcacgacaggatcttttgaagcagttacgggattttgcttcgtctacggcaacgaaagaagatcaatggcttcatatggcggaagatgactctcgatttttatggttacgaggtcaagatatagattggcgtacttgctggccttccgggcagaaaccgttgcgtattcgattacccaaatatgcttttgaacatcggcgttactggttacctcacaatgaatccgtggttgcaaaacagtaagcagtgaagcgggataggaaaaccagaaagcatggtggagatcccacaatttcgtaagaggttgtggggtttctttgaggcacaatttatgctgttcacccttgtgataaagatgaaatatcagatctatacccgtcatctttcaagttgcttctttgttggctgcactcactcaccccggtcacatagctatctatgctcccggggattcgctcccttgccgtcgcgatgcatcttgaaatccatagggtatatatatctttgaaataattatttttagtgagggttaagatcaagcttaattaacgccattattgtcctaatttaataatataattaacctgacttttttctgatattattttcaactcggattatattctacaaagaaatttaaaataagcgttttacagtgattgttatcacagagtgagcttttgtaaaatactactatggaattatatatttctatttgatatattgttaataactagttggtttctttatcgatatgagtttgtgatgattgaggttttactgtgaaatatcattttatttgatagagagataatgttaattcaattaaccaagagaaatgatagtcactttaaaataaaattttatttgtagagataaaaggaaggtaatatggaatttattaaaaatagattttgtcactggaacggtgaacaccttgttgtcgatacaatggccagaaatcataaaatggttaacagtatgggaacgggcgagggattagtttcgtttgatggctttggtgctgatctaattcgtttcagcaaagatgaggggatgcagaatcatactcacttagggcatcatatcttatttgtcctcgcaggaacgggttatgttatttatgcgggtgaaaagcataaaatagagcctggagtttgttattttgtgaatggagaaatagatcacgcgattaaagcaaccagcgatttggttatgcttgttgtcggtaataatcattgtgcggttgatgcgcaagataggacgacgctggtgccatatagagagggaacgccagaggaattaaaggtttaacttgggataaattaaatatgtgctagtgcttgatgggttgcgagaatgccatgatattcatgaaggtaattataaatcaggataagtcattggagtgataaaaggatgatatgagcatctcatgaaggggatcaggtactagcctatggaatattaaatttactgaaaataaaatggagaaatatattagagataatatgctattgtaatgataaaggtggaaataacgattgaaattattttaatctaatatttaaattggaaaataatttcaatgagtggcggtaatgagttttcggatggaaattaacttataccctatggatttcaagatggatcgcgacggcaagggagagagtccctgggagcatagcaaactatgtgaccggggtgagcgagtgcagccaacaaagaggcaatttgaaggataacgggtataaataacctgagttctggttaagccgttactaacatatccatttctaagcaggaaatattcagtgactgttctctttgagataataagctatctgtccctctaacacatttaacattaatccttgcacactacagtgtcgtgaatgttctgtttgggaaatattgggtatccgtatttaggggttgatgaaccaactaaaggattccctttctcgatatttatatctcgtatttaatggttgagtagtgtcaatcttaatgctacggtgaatagtattatcattgtttctcaggccattacaaatgccaactatcagtgaattttttgacatcttgatctggatgtattaaccataatccgcctctcaacaagattgaaccactggagagattatcatgcgcagagtaacgaaagtggaaataaagccagaatacaccttggcggtgacgttcgatgatggcacctatggagaggtgtgcatcgcggatcggttgttcggacccatgttcgagccactgaaagagcaggaattctttgcccaagcgcgtgttgatgagtgtggcgcagtgtgttggccgaatgatgttgatctggcacccgacgcactctacaaaaagctcaaatcccacttaaggggtaatatatgactgaactgtttgcatcgcttgcgtttggatattggcaaaagcgagcgttttagtcattttctagaaggtattgatggactgactaaaatacaattttatccttccgtttaaaagcaagataaacaccttctttaaccatatctagagatatatattcagtgccaaaatttcctgttggcttggttttataaggaatgagttcttcattgaagatttcttggtaagatttccctagactgtttattaatgcctctacattgactgtcacttgtataaccctttttgcttcctaccagctatcactctagttgatttcggtggatagtagtttaacacctgaaccgactggaaatactagaatattgctattcttctgtaccttcattcgatattattcttgaagtcaacttttgtttttcaattccatcttacatacgctctcattcttacagagtttattatagttatgactaagctctgctggttgcagagcttagtccttgtaagccactatttcttattgataatgttatgcgaataattcatttgatagtaatttcatgtaaatattaaccacttacaagaaaaacagtgaaatacgacaaagaatatttaactctaaaatcaatctttctttgaaagatagagtttcttcgcatcttccaaactcatagaattagctcctcctgaaaaatgtgggtctgctgattgaacaggatcatcttcccaatgacatatcgaacatatttcatattcgcctaaacgttcaattgtctgtttaccacaacaaggacaagtattatatcccattatttcctgttccaatattcaaattcactttcagtttaattttttaatctattgattaatgaattgattttcaagaaaaatttcctctttatattgactaccaacacacttctgaggtgagtaggagtgttatgtattcaacacggtcaagtaaatcataggagatctgcatacttgtcggaacacggaaattaagtaatgtatataagtccttacgaccaaactggtgcttcataatcatctcaggcggatgcgacttttcaggctctccaaactgttcatgaatccattgacgagacatcatcgaaattaggggagatggcaactcgttgggaaattgatatgatggcttatctcgatcaattagggtaattgtcacaacaaataaaatcttattttttcttttaaatgccaaatacacaccttctttaatcatatccaatgatatataatcacagcctaggtgtcctttaggctttgttttataaggaattaatccttcactataaatttcctgataagttctacctaaactattaattagtacttcaatgttaatcgccattatttatataacctcttttctcaattaagccaattcatcttcaatttaaccttttaagctgctgattaatgaattggctctcaagaaaatctcctctttttgactaccaccaacgtacttctgaggtgggtagaaatgtcacttctttaacgcgatctgatagatcataatcaacttgcatgttagttggtatacgaaaatctagtatcgtgtacaaatcaacccacccaaactcttctttcattatcacttttggttcttttgacttttcaggcaatccgaattgttcatggatccactgacgtgacatatgtgagatcagcggtgatggtaactcatttggaaatgtgtatgatggtttatcactatctagtagagtaagtgtcacatcaaataaaattttatccttccgtttaaaagcaagataaacaccttctttaaccatatctagagatatatattcagtgccaaaatttcctgttggcttggttttatagggaatgagtcccgcatcaaagatttcctgatacgttttccccaaactgtttattaatgattctatatttactgtcatttgtataacctctgttcctgatttagtttatgcatttttactctagcttcttcgagctgacgctctgttgcaccatattcctgtaatgctggcattatcgtattaaaatctcgatcgacagctccccgtaagtcacaggcatcctgtcgtatttgctcaggggtattacgtcccccataggtcgcactgagttttctatggacatcagcaggaataattatagctgctacatttttcgataatctttccagttgcttgggtttcagttctggataaaggtttttccagtaagcctgaaccgcagcatccgaaggcatatgatctgcatgtgttccattcctcagtctccccgcaaagtttttatacaaatccacctcaaacaatttcaccggcggtttactcaaatacacatacaccggcggcatattcgggatggggagtatcagaatataatcccgaaaatccttctcttccggcattggcaacgattcaataccaatatgatagctgtgtgaggtattaaccttacttaaccgtgataaaaaggattataaaaatcctttttatcactgacttaattgctattttttaaagccaggtttaccgcttttggctcgccattctttgatttgcttcactattccttcaggagaatcatcctgaccagacgatgggtaaaaaaggatatcagtaccatctggatgctctgataaacggataaaatcttgaactgcaacattagcttcatcttccgtcgcatagtctgcattgcatacttttctggcaaattctaaaaactcagcttctgtataatcttctaactttttatttagcttcattttattccacctttgcttgaatgaatttcgatatgcctttttggtgttgttacacgaaggttatcgagattatagacttcaccaccgtctttaataaatttaacatgatggatctcatatttttctcgatttccaatgtgttcctgtcgtggtgaatatggagagtaactcttttttaaaaactctttattatgtgaattaaattgctgagacaactcaggatcattaccaacctctttccaaaatgcccttctgaaatcatcaaagttattaaatctcctccctcgtaacttatccgctatctggctagggatgggtgcccccatatcttgtcctgcgagacttaaccaattaccttcaactctttgtccttggccagttaccactcccggttggttccgaggagtattaaacatcacataaactggtttcattcctgaaccggcgggaaagaccagaatataatcccgaaaatccttctcttccggcattggcaacgattcaatatcgctgccgactttatccgggatcggcaatacggttatctgcgacggaataaacggctgttcctcattcccggtatggggtggaactttgaattcctgatcgtttggtgtccataaaatcgttggccgatattctcctggttcccagaactcataattaccggtgactggattccgtttcatcatacgaaccggcactttatccagaccactttctgggctgacgtgatacccctgaaccgtcatcctgccgcttttttcatctctgatccagcgaaaacggacacgggtcggtgctttaccatactgactggcaatttcactaagatgatattggtttaagtaatcttcctcgctttcatttaaccccgatgaataaaacaaccccattaatccgactgtcaacggattcggcgctgccagccaacgtccggcactagtaacgccaccgccaatgaaacgcatcaccagcgcttcgccatccgctaccgcgctgcgagtcgttgcagctacagcagtcgcagcggcttcggctttatctttgctattgctaaaccaccgtttataccacggtaattttttatcctgtggcttatccggttctggtggatgttttttgccttgcggaggctgttcaggctttgattccgtgacaggggcgggcgatgatagaacctgatatatccccatcctaccgaaattatttgccggttcagtctccgtaccggcgtcggtacagcctttgccccgttgacgagatttggcaaataccgggatcggtggaggcggcacttgtgtcaccggtggaggattggactgaactgttgttgcttccttcattggtgatgagaagttttgcgtcgccgtataagcaggtgttaccgcttgttgacgaggctgttcctgcttctcgtagctgtccataaccgaattgataaaccgggcccggcaagggcaggtgctgacactatccaatgtgccggctaatcgttgccccatatcaaacatatctgatatgccgccgacaatcatataagtaccgggatgcttgccgcaggtaactttatccccttcacgcgcggtggctcgcccattaaatgtcatggtgtgatcacccgtaataatctgtccaccacaggtagttttgtcaccaaccagcaggtaataccctattgccatctacttcacttcccctttgactagccacattaatcttttttttaactaaaataattaccgtatcgttacaacttaaaaggtaataattgatcggtaatgcaatatatttgagttaaagagatatagaaaagttcagaaattaatgaaaataaaatcgaattttttgctgctagctctatcccgcaaatacccggtcaaatttctcattgttccagccatcggattttttctcttttgtcatgctaaccgccatttgattccatattttctgatcgatagcgtttgaaaatctgacaaggaaagccgtggctgaagatagcgatcttgagaaaacagaagaacccacgccccataagcgggaaaaagcgcgaaaagagggacaaatagtccgttccagagagctgagttctatcttgatgttgaccagtggtttaagtttgctctggatgagtggtcagtcaatgacgcatgaattgtcgttgatggtgtttgaagggtttagctttgatcacagcatggtcagcaatgataagcagatggttcaacagattggcaggttgctgcaacaggctgttttggccctgctgccggtttttgctggattagtattagttgcattaagtgccccggcgctattgggtggattagtgttcagtaccaaatccatcaaatttgatccgaaaaaattgaatcccatttctggcctgaaacgtattttttcaatgaatgcgttggcggaattattcaaagcattacttaaagcgggatttgtcggtattggtgctgctttgttcctttggatgaactggcctgccatgttacggcttatagctcaaccgccactgttggcactggatgatgctatgcaaatgctgatattcgccggttatgtggtggttttcatgttgataccgatggtggctttcgatgttgtttaccagatatacagccatttgaaaaaactgagaatgacccggcaggaaataaaggatgaatttaaagaacaagagggggacccacatgtcaaagcgcgtatccgtcagcaacaacgggcggctgctcgtcagcgtatgatggcggatgtaccgaaagcggatgtgattgtcaccaacccaactcactatgccgttgcgttgaaatatgatgaaaaagcgatgagtgcgccaaaaatattggcgaaaggggcggggatcattgcattacggattaaagaaataggtacagaaaatcgtattccattacttgaggtgccgccacttgccagggcgctttatcgccatggtgaaattggcgggcagatccccgcgacactgtatgcggcagtcgcggaagtgcttgcttgggtctaccaattgaaacgttggaaacgggaaggcggcttgaagccgaagaaacctgaaaatctgccagtgccgccagcactggattttgctggagaaaataatcgtcatggctaatctggcctctatacttcgtttaccgggcaatatgaaaggctcgcaatggcaaatgcttgccgggccggtattgatcctcttgattttgtcgatgatggtattgccattgccgccattcatgcttgatttactgtttacgtttaacatagcgctatcaatcatggtgttgctggtggcgatgtttacccggcgtacgctagattttgctgcatttccgaccattttgctgttctccacattattgcgcttatctcttaacgtagcttcaacccgtatcattttattggaagggcatacgggttctgcggcagcggggcatgttgtagaggcatttggccattttctggttggtggcaacttcgctatcggtattgtggtatttatcatcttggtattgattaactttatggtcattactaaaggtgcagggcggattgccgaagtgggtgcccgttttgtgttggatggcatgccgggtaaacagatggcaattgatgccgatttaaatgcgggattgattggtgaagaagaagcgaagaaacgccgtgctgaagtgacacaggaatcggatttttatggttcgatggatggtgccagtaagtttgtgcgcggcgatgcgattgcgggattgatgatcttagttatcaacgtcgttggcggcttaattgttggtgtggctcaacatggtatgagtctgggggatgcgggggaagcgtataccctgttaaccattggtgatggtttggttgcacagttacctgctctcattatttctactgcggcgggtgttattgtgactcgcgtagcaacggatcaggacgttggtcagcagatggtgactcaactgttcaacaatcccagagtgatgatgttgagtgcgggtgttcttggattgttgggcatggtaccgggaatgcccaattttgttttcctgttatttaccgcggcattagctggtcttggctggtatctatatcgccgcaccgatgcgccggcgataaatacagaaaaaccaaaaatagaagagcagcaacagacatcagaagcttcatggtccgatgttcagcttgaagatcctttgggtatggaagtaggttatcgtctgattccgatggttgattttcgccagaatggtgaattactggggaggatcagcggcattcgtaagaaatttgctcaggagatgggatatttaccgccggttgttcatatccgggataaccttgaactggccccagcgggctaccgtattctgatgaaaggggtagaaattggtcgtggtgaagcgcatccggggcgctggctggcgattaaccccggtggtgccgtgggggaattgccgggtgatatcaccaaagatcctgcttttggcctgtctgcggtttggattgatgatagcctcagagagcaagctcaggttcaagggtacacggtggttgccgccagtacggtggttgcgacccatatgaatcacctgttgacgcaatatgcgaatgagttatttggtcgtcaggaagctcaacaactgtttgagcgggtcagtcaagagatgcctaaactgaccgaggactttattcctgatgttgttaatctgacaaccttgcataaagtgctgcaaaatctgttgtccgaacaagtgccgattcgagacatgcggacaattattgaaaccttggctgaacatgcacctggacaaactgatccttatgaattgacatctttggttagaattgcgcttggccgggcaattgctcaacagtggttccccggcgcacaggaaattcaggtcatcggattggatgcgggccttgagcgcttgttaattcaggcgttacaaaatggcggtggtctggaacccggattggcggataacttacaacggcaagcgacggaagcactgcaacgccaagaaatgttgggcgcgcctccggtgctgttggtcaatcatgcattacgcccgctgttatcgcgtttcttacgtagaactttgcctcaattagtggttttatctaatcttgaaatcagtgataaccgtcaaattcgtatgaccgcgaccattggtggtaatggatagcggtatcaatagaatagtgggccatttttattccaaaatggcttgctataatcatcttgaaatccatagggtatatacccgtcatctttcaagttgcttctttgttggctgcactcccttaccccggtcacatcgttatctatgctcccggggattcattcccttgccgccgcgatgcatctcgaaatccatagggtatatatttattttaacttttccatcttggataaatgtaaataatggacacaatctatatgttatttattcccaacatgcgttttatttggaattcataaatgatgatattatgtccgtcgctgatgttaaaagattttcgaaatagctcaaaaacagatcaagttacactgggtgagaataataaataacgggataaataatcgcatattgaataaaagaatgataaaggaaagataaaaaataatacccaaaattgggtgacgaaaaaggaaaattcagtaatatcggatgccctacacaattcaaaaggatgagagttaaatatgtataaaaatatgttaaatcccgtaacattaagaaaaacagcaaacggacctcaactaaaaggaaatgagggtacatatgacacatcaatattaaaaggcagccctgtaggacgaagagatattgggaattccgcaccactacccgctcaagcagaagtttttcaaaaagttgttgacgaaaaaatagcaaacttcaaaacaaagggaaatccaatatcaatcgttgtctggcataatagtcggacagggcttacccatatcatggatggtcagcatcgatttattgctgcatgtatacttggagtgccggttaatttgacatggaaaaagttcggcataccgcctaatcagatagactggagtggtacaaaattctcagatggaataccagccaaaaccaagatatttggaaaatgatcgattaagttaatttaatgtgtattaagcgcaacttgagttgatacaacaccttgaaaaattgagagttaccggttttggtatagagttgaaatcttaaacaaaatgccaggtaactctcatgcttcataaataacttttcaaaatagtagaacacttggagggaactcagtccaatttttgcaatctgatcaattgtagataatcccaaaccactaaacggactgagttatgcctatcatagcacctataccccgcaatgaacgacgccagatgaaaaaaattatccagaacacccgagataaagattatgctcgcaggctcatggccatattgatgctgcatcgaggcgagtctgtctctctggtcgccaaaaccctttgcgccagtcgttcttctgtctatcgctggataaactggttgactttatatggtctggaaggactcaaaagcctgcctgtgggcagacccgctgtctggaatttaatcccgctttatcctttactgtcttttttattgcaatattctccccagcaattgggctgcctgcgttctcgctggagtcttgagttttttataattaaaatcaatgaattattaaacataaaattatccatcagtaccttctatcgttacttacataaaatgggtatcgtgtggcgaagggcagccccgacgcttaaattacccgatcccgagtaccatgaaaaaatggcgaaaattaccgaggcattgtcaacgtgttcagaaaaacatcccgttttttatgaagatgaagtcgacatcgagctgaatccaaaaatcggggctgactggtatttaaaagggcaacagaaacgtatagtgacaccaggaaaaaaccaaaaacattattttgcaggttgcctgaatgttcaaacgggaaaagtgacttatgctgacgggttaaataagaattctcatttatttatcaatgtattggaagaacttgaacgccagtattgtcatgctgaaaccctcactttgattttggataattacagtatccataaaagccgacgggtcagagattggctggcttgtcatcctaaatttaatctgttgtttttacctgtttattcaccctggctgaataaaattgagcgtctgtggcaatccttacatgaaacggtgacacgaaatcatggctgtcagtatatgtggcaattgcttgagaaagtgaaaacgtttttaaattcatgtccctacaggaatagcagagaataaaaagagtgagtgtattataattatgaaaagttatttattaccaatcctattatcaaatatataaatctggaggatgagttctatttttatattttgttaattttaaatctctatattcttaattctttactattgtataataaattttccatttaaatgaattgttagtcatattaaaacaaatcagttttaattgttatttttagtcttatttaatgttatggaaaattaaatcggtaattgatgtggctgttaataaattttttatatatattaagtctctcctttcgtcattttatcggttattcccggttatgaattatttaatgtgaataattatgattctggtattatttaagtgtacgctctattttcttaattattaaaatgaaatgtttttattatgtagcagagaaatatctcgaaataaatatgtgacatttataaatgtcattgattattatgtttgtcctaataaaattcttggttaattattttgaatctaattaaattaatggttgtttcgatactgatggaatattgtttaaacgatatctttttatgtgagattttaaaaaaaaagtaattaaaattttattaaatagctggcaaaaattcacttttctataatgcttaaatatagctgattgtttcacacgaaaaacgaataacgtagtcaagttaaatattaaataagtgttatcggaagcgagtctgccgagcgcagtttcagctataaatagccaaggtctgattttattaatagggggaaataatgcccactgaaccgccgctacatcaagaagatattgtcgtgatacatgttgccacacccgacgatttggcgaagtttgctgatcaatcacttttctggaatgaagaaacctatgaacagatgaaaactgcggaagtgttgtttacgccagcgggagagattccacctggcttgggaattaaatatgtcgccacgcccggtgatttggtgaggtttgtcgatgaagaaggctactggagtgaggaaacctataaacagatagaggttgtaagggtgttgtttataccagcagaaagaatccgcggtgtggggattaaacatgttgccacgcccgacgatttggcgaagtttgccgataaagagcttttctggagtaagaaagattacgaacagctaaaagccgcagaggtgctgtttgtacccagagaaggaatgcccggttagggggctaaacatatcgccacgcctgacgattcggtaaagtttaccgataaagcggtcaattagaataaagaggaagtatcgagagagggataaagccggaatattgtttatcccgaaaataaaagaatagaacggcgtgtaataacattaacttatctgtcattcggaattggaggtattaatggctcacaacaagacatctactacatccagcgagaatagtttgttggataaagaggaagttaaatcctggtttaaattatattccctgccgaaaagtgaaaattatgctcaattggtgcaaatagcggcggaaggtcgacgtttggccgggctggaccctgctcagctcgataataatccaggggcaggattgaaccgggatctggatgaagtgaatttactcttagtgaatcccggtgatggggtgcatatcggcgaagaccgtgaaattgctgtcaatattgataaaagcagcggcttacagttcattaatggcgaattgggattacgccccgactttaaattgtcgctggaattgtttgagagttttacagaggaacaaaaaagggagctttaccgttggctgattcatgctgaggagatggcagcaagtaaggcgcagttgcccgcgtttgacttgccggccaatggtaacaataaaaaccttggcgctgttgtcagtgtcagcggcgatgggaaaactattgcgcttagtggggcagaaggaaaggatcctgtatatctattttcttataccgataacggttggcggcagcaattcgctgattacgttagtggttatagcggcagagcgttaagtttgaatcgcaatggtaatgtcctcgcggtggggattgataaccgaaacagtgatggtgggcatggttcggtgttcgtttatcgcagattggcaaatggcgcgtgggagaaatcggccaaactttggcttagtgaggcgaacgttcagcagcatttcggttgcgctgtgggcctaagtgctgatggcacactattagcagtaggttcttatggctggagatcgggtttattggctaactgcggcgcagtgtatctttatcagtatgacgggaagaaatggtcacagcttggtgagcgtctgaccttatcttctccggcacagggcgatatgtttggcggcaaacttagcttgagtgccgatggttcaaccttggcagtggcggcaacggggcgtaatggtaatggtgaagtgacgatatttcatcgtcacggggaatactggcaaccgcaactgccactcaattcgctgacttcgcctttaaccatcagtaaagacgactttggtgccagtctcagcctgagcgatagcggcaatattctggcggtggggtgcccgggagagaagaacaatattggtgcggtctatctgtaccagcgtcaccgtaatgtatggcaagttatagggatattgagagaagcggtgactgccggggaaaggtttggcagcgaactctctttgagtagtgacggccagatgctggtggtgtcaacacctgttggtaaaaatgacacaggtgtgcaaaccggtgcggtatggtggtttagctatcagaatgaacaatggattatgcagagcaaattactggagctggatggggaatcaaaccataaatttggtgccggtgtttgttttagcggtgacgccaatacattggcgattggtgccagtggctggaaaagtggcgaagggaaagtttacctttacgactagctaaatgaggaaaagacgatggtgaaagagataacagatgaaacggtcagtcagcttggtacccacttcgcccctggcaagatcccgactgaggcggcgttttattcactgattgattgggccacgttgtggcgacagctttttggttggcaggatggtgctcaagcttatcatccggggggcggtttgcaggttatcgacaaccgtttggcggttaagactggcaatggcatcgcggtgaaaccggaggggcttgcgttaaggctacagcccaatgggggattgatgttggataaatctggggcgttgtcagtggatggtactgtagccgtttcggcacaagcttttaaattgcttcctgaggagacgcggaaacaaattgccaagttgttattgaatgctgagacagaaaacagatgacagagaatagatgacggtgactgcctaatacggcttttgaggacatattatgactgataaagaaatgagttctgttgactcattgaaagcgagttttaagtctggtgttccgcctatgcctgaagcattttctcatttgattgatgaggcatatagggcatatgaaatcattgatggtgataagcgggatggcccgaccgcagggctgggacgagatgacaaaggaaaactagccctcaacactcaccattctggcgggttaaaccttgatcagagagctttggccctgtcactgaagctagaaggtgggctctcttttgatgggggaaggcgtctgaaattagatgccgatcggcaggttcagtttgccgattttttcagtttatcgcggtgggagcggatggagatcgcacagttgttgggtttgaaacgcagtaccacgatgatgcgtattgtttctccttcccctaaagagaatgaacgctttggcacttctgttagcctgaatgcagcgggagattgcttagtggttgggatggggaaagagctctatttgtatatgagccggaaaggtgagtggaatacaagcgctcccattgtgtttgaggctgatggagataaatatcgtagtgcttcatggagtgtcagtctggatgcggagggagataacctggctgtgggatactcaactccaactgatactcaaacaatggaagtttgtttgtatatgcgcacgcatggtgtttgggatacaaaaaatcccattgtgtttccaatcaagcgttcttatggagactatgatgtgaatgtcagcttgagcgcagcaggagactgtctggtggtggcgggggacacctatccattctatgtgtatacccgcacgaatgggatctgggacagagaaaaccccattcagcttcgtttttcgaatgttggggccacgatttgtctgagtgcctcgggaaattgtctggcggtgcatggttcctattattctgatcgtactacaataaacatggtttatgtgtgtacacgtacgaatgggacctgggatgaaagctacattaggttcaatccccctgaagatagctcacccggttttggcaaggtttttagcctgaatgcagagggagatcgtctggcggtgggggcggatgatgattcacctattattaatgggaaggtttatctgtatacgcgcacgaatgggatctgggatacacaaaatcccattaagttttcggtgcctgcaagtggcgtaacgtattttggctgcgctatcaaactgaatgatgcgggagaccgtctggcagtgggggcggcttctagggtgtatgtgtatacctatctgaatggtaagtggaatatggaaacacctaccgagattttggacccttcaggcaatttagacaatttaaatggttttggtaaggctgtcagtttgaataagttaggaacgagtttggcggttggtgcggttttagccaaggtcggttctgctcctgaagccggtgcagtctatacctttgagaaggtcaaatagaggacagaagacagagaacagatgacggtgactgtctaactacggcttttgaggaaatatgatgactgataaagaaatgagtactgttgactcattgaaagcgagttttaagtctggtattcggcttatgtctgacgccttttctcatttgattgatgaagcatataaggcatatgaaaccattgatggcgctccgtgtgatagtccaaccgcaggactgaaacgagatggcaaaggaaaactggccctcaacactcaccattctggtgggttaaaccttgaacaaggggctttggcgctatccttgaagctagaaggtggactctcttttgatgggggagggtatctgaaattggatgccgatcggcaggttcagtttgcggattttttcagtttatcgcggcgggagcggatggagatcacgcaggtgttgggtttgaaacgtactatgataacgcgcattgtttctcccttccctaagagaaatggatccttgggcgattatgttagcatgaatgcggcgggggactgcttagcggttgggatgattaataaagtctatgtatatacgcgccggaagagtggtgagtggaatacaagcacgcctactgtgcttgagccttttcaaaatgattatttgggatcttcatgggatgttagtttggatgcggcgggaaattgcctggcgttgggaaatagaggacccgctgatgctagcatgatggttggtgtatatacacgcacgaatggcgtctgggatgcaagaaatcccgtttggttcccggctctgggtgccagagaatactttggtattaatgtcagcttgagcgcagcaggagactgtctggtggctgggggcatatactcctctacgttccatatgtttacacgcacgaacgggatctgggatagagaaaatcccattaaatttccgatcccttcgggttcttatgaatttggctgggctgcccaccttagtgctgcgggaaactgtctggcagtgtttggagaggatccttcttctggttacataagaggcacgatttatgtgtatacacgcacgaatgggatctgggatagcgaaaaccctattaagctcaagctccctgaaggcagctcatccctttttggcaaggtttttagcctgaatgcagagggagatcgtctggcggtgggggaggtgcgtgattatttccccattattaatggaaaagtttatctgtatacacgcacgaatgggatttgggatagcgaaaatcctattaagttttcggttcctgcaagtgacgtaatagattttggacgctctctcgaactgaatgctgcgggggatcgtctggcagtgggtgcggctgccagggtgtatgtgtatacctgtctaaataataagtggaatatagaaacacctacggagattttggacccttcaggcaattcagacaatttaaatggttttggtaaggctgtctgcctaaataaggcggggacgagtttggccgttggtgcagattcagaaagtgtcgattctcaaccccgagccggtgcagtttatgtttttgaggatgtcaattgatggctgttatagaagacagaaggcagatgacggtgactgtctaatacggcttttgaggaaatatgatgactgataaagaaattagttctgttgactcattgaaagcgagttttaagtctggtgttcggctcatgccggaagcattttctcacttgattgatgaggcatatagggcatatgaaaccattgatggcgctcagggtgatggcccgaccgcagggctgaaacgagatggtaaaggaaaactggccctcaacattcatcattctggcgggttgaaccctcatcaaggcgctttggccctatcactgaaaccagaaggtggactctcttttgctggaggagggtatctgaaattggatgctgatcggcaggttcagtttgcggattttttcagtttatcgcggcgggaacggatagagatcacgcgggtattgggtttgaaacgcaccatgatgacgcgtattgtttctaccactctctctcccgaggcgcgtgaattttttggctattctgttagcttgaatgcggtgggagaccgtttagcggttgggatgaatactaaaatctgtatatatacgcgccggaagagtggtgagtggaatacaagcacgcctattgtgcttgagtcttatcaaagtgattcttcatgggatgtcagtctgaatgcggcgggagattgcctagcgttggcaaataggttcagacagagggttggtgtacatatgcgtgcaaatggcgtctggaatgtaagaaagcccgtttggtttccggctccgagccgcattgaattctttggcctgggtgtcagcttgagcgcagcgggagattgtctggtgactgggtgcgaattcaaatctgcgttacattctacgttccatatgtttacacgcacgaacgggatctgggatagcgaaaatcccattaagtttccggtcccttcgagttcttatgaatttggcaaggctgtccgcctgagtgccgcaggaaactgtctggcggtgcatggttacgatgatttcacaataagcacgatttatgtgtatacacgcacgaatgggatctgggatagcgaaaaccccattaagttcagtcaccttgaaggtcaatcatctgttttcagcaaggtttttagcctgaatgcagagggagatcgtctggctgtgggggtgggtttttataagtccacgaatattgttagggaggtttatctgtatacacgcacaaatgggatttgggatagagaaaatcctattaagttttcggccccttcaagtgacgtaacgtattttggccgcgctatcgaactgaatgatgcgggagatcgtctggcagtgggtgccgcttcccgggtgtatgtgtatacctgtctgaataataagtggaatatagaaacacctatcgagattttggacccttcaggcaattcagacaatttagatagttttggcggggctgtcggcctgaataaggcggggacgagtttggcggttggtgtaatttcaatgaagattggctctgcgtctgaagccagtgcagtttatatctttgagaatgtcaaatgatgtccatacagaagacagtgactgtctaatacggcttttgaggaaaatatgatgactgataaagaaattagttttgttgactcattgaaagcgagttttaagtctggtgttcggctcatgccggaagccttttcctatttgattgatgaggcatataaggcatatgaaatcattgatggcgctcagggtgatggcccaaccgcagggctgaaacgagatggaaaaggaaaactggccctcaacactcatcattctggcgggttaaacctcgaacaaggcgctttggcgctatccttgaagccagaaggtggactctcttttgatgggggaggatatctgaaattggatgccgctcggcagattcagtttgcggattttttcagtttatcgcggggagcgcggatggagatcacgcagttgttgggtttgaaacgtactatgataacgcgcattgtttctcccttccctagaacggatgagtattttggtagctctgttagcctgaacgcggcaggagactgtttagcggttgggatgaatagtcacgtctatgtgtatacgcgccggaagagtggtgagtggaatataagcaagccgattatgtttgaggatgttgaatatgatttatcttcatggcgtgtcggtctggatgcggcgggagattgtctggcgttgggagacatatggcccgaagtggttcgtgtatatacacgcacgaagggcgtttgggatacaaaacatcccgttgtgtttccgagggatgctgtaagatttggtgcgaatgtcagcttgaacgccgcaggagactgtctggtggctgggggcaaatactcctctccattccgtatgtttatacgcaggaatgggatctgggatacaaaaaaccccattctgtttccggccccttcggatgcttatgagtttggtgcgattgcccacctgagtgctgtgggaaaccgtctggcggtgtgtgatgattacatttccgcgatttatgtgtatacacgcacaaatgggatttgggatatagaaaaccccattaagttccgtcgccctgaaggtggatcatctagttttagcggggtttttagcctgaatgcagagggagatcgcttggcggtgggtacggatttttataaaccctataatggggaggtttatctgtatacgtgcacgaatgggatctgggatagagaaaatcccgttaagttttcggcccctgtaagtcgcatagattttggacgctctctcgaactgaatgctgcgggggatcgtctggcagtgggtgcggctgccagggtgtatgtgtatgcctgtctaaataataagtggaatatagaaacacctacggagattttggacccttcaggcaattcagacaatttaaatggttttggtaaggctgtctgcctaaataaggcggggacgagtttggccgttggtgcagattcagaaagtgtcgattctcaaccccgagccggtgcagtttatgtttttgaggatgtcaattgatggctgttatagaagacagaaggcagatgacggtgactgtctaatacggcttttgaggaaatatgatgactgataaagaaattagttctgttgactcattgaaagcgagttttaagtctggtgttcggctcatgccggaagcattttctcacttgattgatgaggcatatagggcatatgaaaccattgatggcgctcagggtgatggcccgaccgcagggctgaaacgagatggtaaaggaaaactggccctcaacattcatcattctggcgggttgaaccctcatcaaggcgctttggccctatcactgaaaccagaaggtggactctcttttgctggaggagggtatctgaaattggatgctgatcggcaggttcagtttgcggattttttcagtttatcgcggcgggaacggatagagatcacgcgggtattgggtttgaaacgcaccatgatgacgcgtattgtttctaccactctctctcccgaggcgcgtgaattttttggctattctgttagcttgaatgcggtgggagaccgtttagcggttgggatgaatactaaaatct

SEQ ID NO: 33 - DNA, 210710 bp, Photorhabdus luminescens
  misc_feature (80335)..(80335): n is a, c, g, or t
  misc_feature (99140)..(99140): n is a, c, g, or t
ataaaattattatcattcatcatagacccagcggcctatttttgtttgtcattatagttgttttatatattagttattaaaaacatagacatattttatcatttatatctacgtttttaagtacgaaaatataattaaccggttgttattttataataaaacaccaagatcaaaaaaattgacttttatctgagagaaaaggtatcttaaaaaacatcgagacaaaataaatctttttatctacaccaatgaataaatagcttgcttttaattttaatattttaaaagattaaaattattaaaattattaaaaatggtaataaaatggtgataacgataaataaaaagactcagatataaaaattgacttttaggaaacataaagaaacggaattctaataagaagtaaaaataagctatccaatatagctaagaaggttagttccaccccaagtgattttatataaccataacaggttgaattaaaatcctggaatttattaattatatttttaaaatcaatcacaagaggtaatattatgtcagagatcgaagtaatttctttaaaagcaccaattagcgttattgcaaaagtaactaacaaatcaccatataaacttaaacttatccaggattctattcgtctggatcaaggtgagtggactactcttcctcctcaagtcattaatagaagcaatgatagcacacctggaaaagcgatttggagaagtgattcaaacagcctgataggtggtgttgcagggcgctgtacttatgtatttgtggatagcaaaggcgaaatctatagtatctatattacatggagtaaccctttgattggcagcagcagctattcaatctcaaccgattatttaggtgatgatttacatttatcctatacagcagatggcggtaataatccagtagtagaatatatgattgtaagctaatacttaatcactagtattaacaaccattcctgtgagaagatattttaattaatatctatacaacaggaatggtttatttatttcgagaaacaacatttttatttaccttaattaaaggtaaatgctgattatttctgtaccaccctctcttttattaaagtggatcatatctccattctggctaatacaatcaactcaacctgattaaaatagtgacttctagccactatttttaattctcttatcagtttaaattctattttctggtttcttatttacacattacaatgatatcgcttttttattatgaaattgattttaatatgtttttatagatggcgaccgataagtattaaaacgatcgagtaagatagcaggatcttgctcaattattgccatatgacgatatttttcatgtaagaattgttcatcagccattttattaatcatcgcaattaacggatcataaaagttattaatattaagaataccgcaaggtttcgtatgtaacccaatctgactccaggtaaatacctcactgaactcttccaatgtgccaaaacccccaggcaaagcaacaaaaccatcagctaactcaatcattttgtttttacgctgatgcatagtttcaacaacgtataattctgtcagatttttatgtgatatttcccgcgactccaataatgttggaataacaccaatgactttcccaccctctgccaaaaccgtattagcaacagttcccataatgcccacacttgcgccaccataaatgagcgtaagattacgtttaaccaattcctttgcgaagataatgacattttctttatagatttcagatatacccagacttgaaccacaataaacagcaatacttttcattatcttagctcctgttactttaccttcacatgaaaaataggattatatacccgtcatctttcaagttgcttctttgtgggctggactcactcaccccggtcacatagtttgctatgctcccggggattcgttcccttgccgtcgcgatccatcttgaaatccatagggtatacgttagtatcacaatcatacaactcacttataaaactgataccaagaaaacaaaataaaaacggtttctttcatattcaatattagcattaatcataacttattcttaattatatccgttatctttcaagttgcctctttgttggccgctctcgctcaccccggtcacatagtttgctatgctcctggggattcactcccttatcgtcgcgatccattttgaaatccattgggtatattatgatatgaaatcaagcatcaatcagatgataataaataccttcatcacttgtaattcctaaattatcaacatattaaaatacaatgtaaatccataccagaattatacaccaataatgaaatttaatctcactataaacatataaaatagtctaataaatgaaaaatatttcgctaaaattatattctctaaacctattgagttatctgcatttcactgcgaagattatcggtcagatcacttgattttaattgaggttttgcccggatgtctccttccaagctccaaaagagtgcctttccattaatacctgtaatactgttactactggctatgacatcaattcagggcggtgcttctcttgccaaaacgctgtttccggtcatcggtgcaccgggtgttaccgcactgcgcctaggtcttggaactctcattctgtttattatttttaaaccctggcgcctgcgttttagccgaaaatccatcatgccactgcttacatatggtattgctcttggcgcgatgaattatacattctatatggcactgacaactattcctttaggtattgccgtggcccttgaatttaccggcccattggctgtagctatgttttcatcacgccgaccaatagattttctttgggtggcattggttatcgccggcttagctttcctactccccattggcaataataatattaatagtttagatcctatagggattatttatgcactcagcgcaggtgtttgctgggcactgtatattattttcggccaacgcgccggtgcaggtcatggagcagcaacggtgtctattggttcatttatcgctgctatgatatttttccctgtcggtttaatacaaacggggccagaactattatttgatatgtcaattctccctctggcactggcaattgcgattctgtctactgcattcccatatacactagaaatgattgccctaacccgtttacctgcacaaacatttggtactctaatgagtcttgaacccgcactgggtgcgctatctggtattgtgtttctgaatgaacatttaactataacgcaatggctggcgctgttctgtattatttttgcctccatcggttctacatcaacaataaaaagaaaacctaaaatcaccgaagttgattaatcattttatttaatcgaaatgaaatagaagccggaggagtaaagtcattctccggttttttataaataaagaaactcattcataacaaaattattcacgcagatttacctgataaattattatacttttcaatattaatctaagaattttatagtgaatatttccctataaaaattaactattgatttaataggaataaactatatgatttaagactaatatcgagttacattcatctcgccaacgaaaaactcattattaacatccaggggaaattattaagcacattggaacatgcgtggcaaaaatttcatttccatccatgaaatgctggatacctttcgtgccacaattattgaacattcagatatctttgcagaaagagtcgtacaacttggtggaatagctctcggcaccgtacaagaagttaatagacacacagcactgaaaagctacccaacaaatatccatgacgtgcaggaccatctaaaagcactggccgaccgttatgctgttgtcgctaatgatatccgcaaagcgctgaacgaagttgaagatgaaaacaccgcagatatgttaaccgccgcctcccgtgatctcgacaaattcttatggtttattgaagcaagcgttgagcagtaaaatataaagagccaccatattatgcaccctatggatttcaagatgcatcgcggcggcaagggagccaacaaagaggcaacttgaaagataacgggtatagagctctgagacttacaggcccctattaacacagggtcctgtttacattagcctttcattaccaagatccgacacggcaaaacatcataaaatgccctccattcggataaatttcgtcatattctttaaaaatcagtacaaactgtctataatccacacttattttcagaaataacttgaggaaatagcaaaatggacaacgaagtaaaagacagcaatggcaccctacttaatgatggcgattctgtacaggtcatcaaagatctaaaagtaaaaggcacatcagcaacgttaaaacgcggcactttgattaaaaatatccgtcttacccatcgtgaagatgaaatcgaatgtaacgcagataaaatcagagggttagtactgaaaacctgttttctgaaaaaagtaggataagtcgccttttctatcgattttatttactgaatttgccgataaaaaaggggggatagggctgctcaggggcaaccttgttaagcagtaagcgaagcgaactaacagatacgcccccctttctttatacctatgcttataactatcgttaaggcaatctaatgtcttttaatttttctcatataaaaaattaacattcacaaataaaacagggacaattaaaatcatccccaaacaaataaatatttttttataaaatcattcaatctcaatatagcgcactcttcttacagcgttttagctcacaccgtaggcatgctactgctttctaataaatactaaaaagttgactttttatatgccgtactgtataaaaaaacagtaatattaatgcaaggaaatccaatatggaaccaacaatcatcatccccggtcatttatgcacatccgagttatttgcctaccaaatacctaatctttggaagcatagttccgttacaataccatcaatactggaaggtagtagtcttacagaaatggcgaaagatatcatccagaaggcaccttcctatttttctcttgctggcatgtctatgggaggtttcatttgtctggaaataatgaagttagctccggagcgcgtaagccgattagctttacttaatagctctgcgcgtccagagacagaagagcaaaaaaagatgagagaaaatttactaaataaaaccactctggaaaatttcgaagaaatcttaaaaaatatggctaccacaggagtgcacaaatctcgtcagcacgataaaaatcttataaatactattattcgcatggggaaagaaactggctttgatgcttatgttcgtcaatccaaggctttaggtgatcgtacagataatcgaaatattttaacccatatcagtgtacctacattggttcttgtcggtgacagtgacaccataactccacctgaatattcagaagaaatggctgaaaagataccaaacgcaaaattaattaaattatacaggtgtggacatgccacaacacttgagcagccagaagaagtgaacaaagcgctcatcgagtggttaaatatgagttaacctatctatgcacgatgatattatttcaacatatcaaacagttaaattaaacggaagttagaatatgttaacatacaataaagctctagagttctttggtcgtgatttcaaatttccccacacaattaaagaacttccagagaagttatccgatttgaaagatcttgaaattggtttttttaaaacaagtgatgaggtatctctctctttttggaaggccggtaaaggagaaactttaatattcatccccggttggtcctcacatggtgcagaatatataaatataatatatcttctcagcaagaaatatgaagtttatgtattggatcagcgtaatcatggtttatctcaaaaagtaaattatggaaatagaatttctcgtttttctgctgatcttcatgaatttattgttgctgttaatataaagaaagcatatttctgtgggtggtctatgggatgttcggtactatggagctacattgatcttttcggattggaagtaataaaaaaaatagcattgattgatgaaccaccttctatttattgccacgcagattggtcagaggaagaaagaattaaagcaggagcttttacaaattcgccagaagctttgatagacgtctatagtggaaaaattcccgggaataaaatgttctttaattctgatatacttaaatattatacaacagaaggagcacccgcatttttcaattcacaaacctttgccaatgaatttgttccacaaagtatagatgatttgaaatcagtactatttgaacatattttaaatgattggcgagatgttatttcccataaaataaccgttcctactttaattttttcaggtgaaaacagcgactggatagaaagccaacaatggatttcatctactgtaccaaaaggggaaattataatttatggtcgggaagagcatggagatcacttcttagcgcttaaagatccattaagattttcaaaggatctttctgctttcttttattaaaaaacaggagaaaagaatgtttaccggactaagtgcttttcctttaacaccgctgtatggcaacaaggtagatgagaagacatttatctcgcttattgaaaatcttgttgaagctggagtggattctatcggcgcactgggatcgacgggtagctacgcctatcttacattatcggagcgcgcgcatgtcgcccgactggctgttgaacatgcgaacagtataccggtgatggtcagcattggagcgctgcgtgtagcggatatactcagccttgctgaagatgctcaacacgcgggtgttagcgccgtaatgctggcacctgtttcttaccagcgtcccacaccggacgaggtgtattcgctctatgaagaagtcagccgttatctatccgtaccgctttgcgtctatgataatcctgcaacgacaggttttgaatttagcgatgagctgctgattaacattgccaatttaccgtctgtcagctcgctcaaacttgctcgcttgccgcaggcactgtctctggctacacaacaggtgaatgcgcttcgttcccgccttcccagccacgtttcgctcggaatcagcggggactggcaagcggcgacgggcctctgcgctggatgtgatgtctggttctctgtcatgggtggactttttccgcgaactgcactggctatcactcgcgcagcaaaggataatgatacaaaaacggtacagatgttgtcggctacccttgaacctgtctggaggctcttcaaaacctatggtagcctcagggtcaccgcagccgccgctgagttactgggcaaagtaaccgccccttgtcttccctttccactcaagtcattatcaggtcagccccgtgatcagctaggcaccattctcgaagatttaaaaaaccttatttaaaccaaatgatgaaaaatatgctcgccggagattttcttttccggcgaagagacgtctttctttacaccatcgtgcttgtagatgatgcgatggtgccgcttctccgcgaagaccctgaatttgcgcagcattatctgcatcaggcttttattgatatggatgaagaaggcgggcaggaagcgtttctaatggcattgcgccacgtagtagaggcgcgtggaggaatggctcaagttgctgaaaaagcaggcatttctcgtgagacactgtatcgcacactgtcgccgaaaggcaatccaacactcaaaactctgcgtagcgtagttgcagcaacagggttccaattctcgcatattgctacgatagcttagtctttgattgattggaatgataaagtctggatggcgatgatatataccctatggatttcaagatacatcgcgacggcaagggagagaatccccgggagcatagataactatgtgaccggggtgaacgagcgcagccaacaaagaggcaacttgaaagataacgggtataagcagcaacttaaggctgctcttccctgtaatcgccatcttctacatccctccagactgtcgtggcacagcatcagaggtacccgtggtttatcatgtttttccagatatccacgagtagcctcgaagtaggtaaacattaattcagatttaacaaagcgcagttgtataaggtggctgattgcatcgtccacaaaaactagaatacgggtatatacccaatggatttcaagatgcatcgcggcggcaagggaacgaatccccgggagcatagataactatgtgaccggggtgagcgagtgccgccaacaaagaggcaacttgaaggataacgggtatagattatatttttgtcatatcagcaaaagacttctgcatttactgctcttttttattgcaatttatctcatgataataaagcctttcttaattaaatattataccctatggatttcaagttgcatcgcgacggcaagggagcgaatctccgggagcatagataactatgtgaccggggtgagtgagtgcagccaacaaagaggcagcttgaaagatgacgggtatacatgaggtttattatgtctgttcctgcatttggattaggtacttttcgtctgaaagatgatgttgtgatcacatcggtaaaaaatgcccttgaattgggatatcgtgcgattgatacagcacaaatttatgagaatgaagccgcagtaggacaagccatagaagaaagcggtgtagctcgtgaagatatctatatcacgacaaaaatctggacagaaaatttaagcaaagaaaaattgataccaagtcttaaagagagtatagcgaagctgcgcactgattatgttgatttgacgctaattcattggccatcaccacacaacgttgtcagtgttgatgaaacaatgaatgcgttactggacgctaaaaatatggggttgacacgtgaaatcggtgtttcaaactttacgattgatctcatgcaacaggctatcgatgcagtaggtgctgaacacatcaccacgaaccaaattgaactttctccctatctacaaaactgccacgtgacagcttgggcgaaagatcatggaattcatatcacttcctatatgaccctcgcttatagtaaagctcttcaagatgaagttatcagacgcatagccaccaaacatcaagccacgcctgcgcaggtgattttgtcttgggcgatggcattgggttatagcgtgatcccatcttcaactaagcgcgaaaatttacaaagtaatctgagagcctccgtgcttaaacttgatgcagacgacatggcggcgatcgccacacttgatcacaacgaacgtctcgttaatccagaaggacttgctccccaatgggataattaatgactcccacttcttaataaactcagtaatctctccgctttgcagaaacatacttgcttatttcagctccttcgggagctgcttccattttcacttagtaaatcgattttacaaattacccttaattatcttagataataagaaaactcgaacatttttacacttacagcaaaagtcttttgtcgtaataagcctttttagaaagagtttgcgaagcataatatctccatatacacaaatcaaaatcaatgaataataaagagtgagaaatattatgctttttgaacgctattctctgaatggtctgtcgttatctaatcgtattgttatgccaccgatgactcgttcacgggctggaacaaacggtatagcgactgatttgatggctgaatattatgcacaacgtgccagtgcaggactaattatcagcgaaggtacacaaatcagccaacaggggcaaggatatgcatggacgccaggtatttataagcctgagcagataataggatggaaaaaagtaacagatgcggtacatatggcaggaggcaaaatttttgctcaattatggcatgtaggacgtgtttcacacacgattctacaacccaataattctgagccggtttctccctctgcccttcaagcaaaaggtgtaaaagtttttctggatgtggcaggccgtggacctgaacatggtatcggtgaaatggtacaacactcgcagccacgagcactgacacttgatgaaattccagatatcgtaaatgattatgttcaagcagcaaataatgctattgcagcaggttttgatggtgtagagcttcatgcggcgaatggttatcttattaatcagtttattgattctcagactaacctacgagatgacgaatatggtggaactttacaaaatcgtttacgtttcttgagagaagtcgctacatcagtggctagcgcgatagggaaagataagctaggtgttcgcctggcaccactcacaaccctgatgggttcaaaagatgatacgcccgaagccacttatctggctgccgcgagtgtgctaaatgatatcggcatagcctatattcatattgccgaagcggattgggaagacgctcccgtcatgccagtaaccttcaaagaagcttttcgcctcctttatcacggcacgttgatatattccggtaaatacactttggaacgagcggaagaagcgctaactaaaggctgggcggatttgatcggatttggtcgcccttttattgctaacccagatttaccctatcgtcttgctaataagctagagctaaacccgccgataaaagaaaaatttttcggtggtaatatggaaggttataccgattatttggctataaactaatatacccgttatccttcaagttgcctctttgttggctacacccacttaccccggtcacatagttcggctatgctcccggggattctcgtcgcgatgcatcttgaaatcatctttataaagattaatttttgctttaacgaccaaagtatttacgggagtcattgacatattcactcagaaaatcgataaatgccctgattcgggtgcttacagcctgatcgctgtaatatacggcattgaaaggcatcccgacgggtaaacgtttttcaaccagtagttcaacaagttcaccactggtaatctccttatcaatcatataatcagacagacacgcgataccattacccgttacacacagttgtttcagggtttcaccactgttggaagaaagtcccacggttatttcatgcagttgtccgtcctgacaagctatcggccaggtattcagtgataccggttcggtaaagccaagacaaatatggtttttcaactcctcaatgcattgcggtatgccatattttttcagatattcaggagaggcgacgatttttcgatagctggaaaaaagtggtcgagctcgtagactggagtcggttaagttgcctacacgaatggcaatatccactttgcgttcaatcagattgatatacgtttccgaagaaatcagtgataacgttatttctgggtagcgttcgcgaaaaggtttaatcagtggtatcagtaaatgtaatacgacgggtgttgcagcatcgatacgcaataaaccacttggagtgtgtttagattccataatttcagtttcagcggcggccatttcttgtagaacatgctgaactcggcggaaataacgctcaccttcttcggttaagctaagctgacgtgttgtgcgattgagcagactcacgcctagtttcttttccagtttttttatagaacggctcacggcggaatttgctaattgcaggtgttccgccgcacgactgaaactcccgttttccacgactgacacgaaaattgttaactcttctgaatttgccttcattattgccttccttgcaaaagagtattcatgtccccaatttccgcctctgaaagaacttccggctgctcaatggggaaaacgggcagcgcttgcaataatcttgggccataccttttgctcagtaagcgcctgtcataaatcaccacatcaccataacattcatggctacggataagccttcctacttgctgaataaggctaaaagaagcacttggtaaactctgcacttcaaaaggataacgtttaagtgatttcaaccactcgctttcagtaataatgaccggattattcaccggcggaaatgaaattttttgaatatgaacttgggacaggtaatctccctttaaatccagcccttccgcaaaagattgcaatccaatcagtacactacattgcccttcattaatacgctgacaatgtgtttccactaaccgataacgtggctgatccccctgcacaagtaacatcaggcgtaaatccgttacataagagagaaagatatccatcgctctctgactgctgaacaaaaccaacatgcctttatgttgctgactcagcaattgagccctgaaataacccgccatctcttgcaaatgagcggcttcattgtgcagtgtcggttcccatgacattttgggaataaccaatttaccctgccgtacatggtcaaaaggtgatgacaatgcgacaaaacggtccccggctttttcagttaacccggtcaattcctgaatacgagaaaaactattcagagaacgaagcgttgccgatgtcacgaccacatgaggaatgctacgccaaagcagttgattaagctgttcactgactctgataccggcacaatggaaatagaggtgcgattgatttttctcatcacggcgtctaagccattttgatatcggtgcactggatgactcttccaacgctgccaaacgccacaacttagtcatattttcaaaatatccaagcgcacgactggtatgcaaaatagaccgatgtaatctgacaatatcctgtttagccgtccgctcagtcaaatcattcagtatcgcttctgccaaaccccgtaaaccatcagtcagtttaaatagctgctggcagcaaagtagcaagttatccggtaatttaccccgctcaaacagatactcatcgacttcattcttttccggtaaaaacgcctgagtgataattgcgagctctctaaagcattcccgtaatttttcactgtgttcattcaggcgactggcattcgctaagcgtggtggctttgccggatggaattgcaccagatattgctcaacatgacgaacaaaagtatccaattgaccattaagttgaaacagggtgatttccccttcaacttccagagaatccctggcaacatccggtatatggtgcccttcgtcgagtaccaataacaaatttttagcatcaggcagtaccgattcactctccaatgccgccatcactaacgcatggttaaccaccaccacatcgacattttctatctcacggcgagcaataaaaaatgggcaacgatgataatactgacagttacgtcccagacaatttgctttatccgtactcactttcccccacaaagcatcggacaaagccaatttatggtgatcacgcaacccatcccaggcaaaggttgtgtaatcactacgcaaccgacgacacaattcccgctcttcactactggcaagctctgttttgtcctcaaccaaaaacataagatcaatctgttcgctatcggttgcacagatagcgtcaagattgcgagggcaaacataacgaccacgaccaaaagcaccggtaaatttcagatcgggaataattttgcgcaacagtggcaggtctttactgtaaatctgatcttgtaaagcaacattcgccgtacttacaaccaatggcttactttccgctctactgatagcaatgccaggtagcaggtaagaaagggttttaccgattcccgttggtgcctcaataaccaaatgacgaccttcctgatccgcaagtgtttttgcaacttcggcaatcatctgccgctgcggagcacgagaaataaaaccattaatatgttgaggtaatatcttataccactgacttatctgattttttattgaattggaaagtgccattggattctactgctatgaaatcggagcgctattgtcccacagagcagaaatgaaatcagctccatgtcgaggcaataatcagtcaactcgctcgttaaattagtgagcaccttgtcagctattcagaacgctatatacttcttattttctacaacatacttcctattttctacaacacctgagaacaataatgaaaaagctccttatcattttcatcgctatctttgcatttggttcaattggcggcgtattcttagcgggccttaatatgtatacccgttcgaccacaccgatagaatcactaaccagccaacaaccagaaaccaccacggcaccggtacaacaacaataacgggctgtggcatattttatctttgtatcaagtgagggacctcatgaataacgcatactttgtcactccacaatggctaaaagatcatcttgatgataagaatctcgtcatccttgatgcaaccgccccaccaccacctcaacaaattgattgtcataaactttggctgaatacccatatccccggtgcccaatttcttgatttagacaaaattgccaatcatcaaagtggattacctcacatgctgcccgatccgcaaacttttagtcaggctgttggcgcaatgggcattagtgaaaatcatttagtcgtgatttatgaccaaggcaatatgttctccgctcctcgcgcatggtggacatttaagatattcggtagccacaacgtccgtattcttgatggcggtttacaaggctggcaacaggcaggatttccaacagcatcaggggaagtgaagcgcaatcctcaaatctttaataccgatttcaatgccgacaaagtgaaatcactggaacaaattctgggtgcgctaaatgatcaacaaatccaaattgtcgatgctagagcgacagaccgctttcaagctaaggccccagaaccgcgtcccggattaagaatgggccatattcccggtagtaaaaacattccgtggaccatgttagtagagaatggccactttaaatcagaaactgaaattaccgatattttccataaacaaggcgtcgatttaaacaaaccggttatcaccagttgtggatcgggaatgaccgctgccgttttggtactgggcttagatatcatcggcaagaaagatgtttatttatatgacggctcatgggctgaatggggagcagatgaagccttaccacttgaaaaataattaaatgctatagggcatctctatgccctcagattattgacaaagtgctggttttttatccggcattttgttttaattaagttccgttcactcaacggagcttgccaccatgttaagacccccccctctccagactttcccgccagaaacgctctcgcttgacgagctggtccctaaaaatcatttggtccgtcaagtcgatgctgccattgatttcgaatttatccgcgaattagtcgccccgttgtattgccacaataatggccgtcctgctatcgatccggtcatgctgattaaaatgatgttactcggctacttgtttggcgtccccagtgaacgccgtctggtacaggaaattcaggttaatgtggcttaccgctggtttctgcgcctcggactgacagaaaaggtccctgatgcctcaaccctgagccagaaccgccgccgccgtttcaatcataccgcggtcttccaacagatttttgaccacattgttgaacaggcgatagccaaaggatttgtgggcggacacgtactctataccgacagcacccacctgaaagccagtgccaatccgcataaatcggagaatgtcatgcggtcggttccccccggcgcctatgttgacgcactggataaagccgtcactcaagaccgggcggcagctggaaaaaaagcctgaagccagccctaaaggaacggcagagaaagacgaaggtcagtaccgtcgatccggaaagcgggtttatgcaccggaccaacaaacccagggggttcttttaccttgaccaccgtaccgtggatgggcaagtcggtattatcaccgatacctacgccacaccgggtaatgtccacgacagccagccttttatcaagcgtttgacgcgtcagttagagcgttttgctctcaatcccctcgcggttgggttggatgcgggctattttacggccccggtttgttatctgacggaacagttaggcattatccccatcataggttatcgccggccgaataagggaccaaatacctttcagaagaaacatttcacctatgaccagctacaggattgttatgtctgcccgcagggagaaaaactgatttataccacaaccgaccgtcagggataccggcattatcaggccccggcggctatctgccagtgttgcccgcagcgtgatgcctgcacgcacgcgaaaggcggaaaaacgataacccgtcatatctgggaggccagtaaagagcaggccagagaaaaccggctaacggaatggggtaaaaaagtttacaagcgacgaaaggaaacaatagagcgcagttttgcggatgcgaagcaacatcacgggcaccgttatgcccattttcgcgggttgcagaaggtgcaaatacagtgtcttttggcggcaactgcccaaaatatcaagaagatagccttgctggtcgcgatgctttgttgtttttatctctggagggcgagccagtcaatgcccgcgaagcgaaaataacgccctgacgggcgattgaatcgggtcaatgaggaaaatgagttgtattatgattcgtaatgaaaggaacaaaccccattattttcaatggggtttgtcagcggtctgagggcatctctatgccctttaattattcaatatatacccgttatctttcaatttgcttctttgttggctgcactcaccccggtcacatagttatctatgctcccggggattcactcccttgccgccgcgatgcatcttgaaatctatagggtataaacaaatagatatatttttcgatccccagataacagccaatcaaataattcccgtatcgttatatttcacaatcctatttattaatttaattctctattcttcaatcaatactattttttatcaatcagagtgacataaaataatgaaataaatatatttgtaagttcaaatattattattattaacttaaaattcgactctgttttttatttaaaaataagattaagctactttccaataggcactaatattgcacgccattcttgtcaataaatcgtggacatgagcaacatgtgaggagatcaatcccaagatgtattgaaactctttatgataaagcaagaaaaataaaacatcctaatgcactaagtactgaaagagttgaatattaatgtattcaccaaagcataatatcaacatttatatcataaaaatggagagtaaaaatgactatttctcttaaagatcaaagaataaatctcgcgctcagctttattagtggtgctggaagtataataaccgaaaaaccagaaccgactatggttgcggaaaacattcaagcatcattggaaaagagtaaagtaactgccaatagattctctattatttgggggcccgctgtttttcgtgttgataatggaaaaaacagtaaagataataaggacgaccacgttttattcattgtaaaaaatcgcaaaattccccatgattatcgcatcgttatccgaggatcatggtctgatgttaactggcaggttgaaaactttgctgtacacgaaaccgtaaattggtcactttgggatcaaaatatcccggaagagtttaaagacgctaagatctcttatggaactcacatagcattagactatattgttaatcaagtaaaaagtaacaatattcctggtcatggagaatcacttattgacgcaattaataaaattgcttcggaaaaaggcatacataatattaccattaccgggcacagtttaggtggtattctcgcctctacccttggattatatttaaaacgcttataccttaataaagggaataacaatattcgtattcatgtttgttcttttgctaacccaaataccggtaatgacgtttttgcctcttacattaaatctgttttcaaccacacgtcagcaactagctataagagccattttttaaggatatataatcgtaaagatgttatttccctcatttggaatctggatggattagcaaaaatcccaactatctatgaaccattaattaaattagatgagaaactaattgacagatttaaaaagattgttcttctcgtgcaagataaaggttacaccaaactcacaccagatttaccttttacagcacctattgcagaactggatctcaataagcaagttgtttttcaacatattaaagcctatgccaaccaatatggcatgaatttagtggaggttaatgacggtactcaaccacctattgatgatcttgtggttattaatagtaatctatctcaagatatcgtcgcttatttcttacggatatctctgcctgataacaatattaatatctcataaatttattatattttatctcaattcaatggagccttattgcaaaggctccattaaactaaaattatttaaacataataataagatcacttttacatatatcatttagaatatcaccaatttataattattcccaaaaatattattcacagagataatctcaaagatatttacatatcactaccattaagtaatatatataataacaaaagatagcaataatattaacatgtaattattcaatatataaccccaatcatttacttttaatttataaataaataatttatatttttgttaaattaaataatatcaaaaaaccccatgtacttatttgacagatttgaaagttatcattaactttaagttaaattctgtttttatccaaatggaagagcaaaagaattaaatcttgatatttaaaccaatataccctacggatttcaagatgcatcgcggcggcaagggagcgaatccccgggagcatagataactatgtgaccggggtgagagagtgccgccaacaaagaagcaacttgaaagataacgggtatacctcacattaacactgattacatgaaataatagggagtaaaaatgactatttctcgtgaagatcaaaaaataaatctcgcgctcagcttcgttattaactctggaggaatcaaaactagcaaatcagaaccgagcattgtttcggaaaatatccacagatcattagaaaacagtaaagcaacagcaaataaattcactatcatctggggccccgcggtgtttcgcgttgacgacgttaatgtgaaaaaaagcgttatagacaaaaaggacgatcatgttctattcattgcgcaaaatcgccatgatccaaatgactaccgcgtggttattcggggatcatggtccgatattaactggcttaatgaagatattattgtctgtaaaactcaagattgggcacgatgggattcaagatcacctgaaaatgccaagatagcctacggaactgacatggcattaggctatattattaatcaaatgaaaagcaacaatcctccgggttatggagaatcgcttattgatgcgatcgataaaattgccctgaaagaagggatacaaaatattactatcacaggacacagtttgggtggtgtactatcttctaccattggtttatatctaaagagacgatatcttgacaaaggaaacaataatattcggattaatgtttgtgcttttgcaggcccaactgcgggtaatgatgctttcgcatcctactccgaatctattttcaatgacatatcagtagccggttataaaagtcatttcctgagaattcataatagtatagatgtggttcccctagcctggcatataaaaggtttggaggaagttaaagctatctatcccgtgttaactgtcacaattaatggtcttatcctttctgtccttgataagaattacacgcaaattttcccagatttccctattcattcacagattccaatctcaccaataacatcgtttgacaatttactggctaatattggcaatcaacatactcatgcctataccaaagagtatgatatgagtttcatcaccattgatgataattcaaatataccgactgattacgatattgttgtagttaatgatagcctatccgaaagtattattgatctcttcaagtttctaaccaaagataaaatcaatattacataaccttattatttatcacataagtggaacctttattaaaggttccattcattgcaataaatgactttccataaacagaattatatacaaattaacttatctaaccgttcaaataagtaatggtatttttgtagaattatttttcacctcattttatcatccatctttaatttcataataaataatttacatgttaccaaataaaataatatcaaaaaatcctctccacacatttgacagattcaaaattcattattaactttaaacttaactatattttttatttaaacgaaagactcaaaaaaattaaaccctagatatgttagccaaagcatcagatcaacatttaccagatgaaaaatggagagtaaaaatggttatatcttgtgaagatcaaaaattaaatctcgcgttaagccttattattaactctggagaaattaacggcgaaccagacgaaatagaaaccattaaatctgatattaaaaaatcacttaacagcagtaagacaacggcaaataaattctctatctgttggggaccggaggtgttcaatattaaggaaaaacaccatgacaaaaaatatgatcacgttgtcatgattgtgaaaaataaaaataatccaaatgattatcgccttgttattcgaggaacctggtctaagattaatgcgattgatgaagatctctgtgtatttaaaactgtagactggtcaaagtgggacacagatatccctcaagaatttaaaggcgctaagatctcccacggaacagacttagcattaaacacgcttattaatggcaaacctattgataaggacaaacctaataatgaggataccgactcactatcgctaatcgaggctcttcaacaaattatcgcagaagaagggaaagataagatactgaatattaccgtcacggggcatagtttgggtggtttactcgcttctactattggtttatatcttaaaaagcgctacatcaacaacaacaatatacgtattcacgcttgctccttcgcaggcccaactgccggcaatgatattttcgcctcctattctgacgctgtttttaaaggaacattaagccctaacgtttatgaaagtcattttctgagaattcataataaccatgatatcgttcccttagcatgggctatcaaagacttgaataaaattcaggatatctatccacatatagaaataaaattacttgttgatgctgttattctttttgtcctcgataaaaattacacccagctctttccagattgctcttttactattacaaagactctaggcaccattgacaacttatctaaaatgataggttatcaacatatcgatgcatatcccgaaggctatggcatgagtttcattcgaactgagaatgctccagtgacgccgaatgatcacgatatcgttgtggttaatgatagcctatccgaaaggattattgatctcttcgagtctctaaccaaaggtaaaatcgatattacataacgttatcttattatgtatatatttgatttaaatggagcctttattaaaggctccattaattgcaataaattatttttccctgcctatcactaattacagcaattcactatcactcacttttgtagataccaatataaattattttccatagctacatccttcacgttatcactaccaatgctaatataatcttacaaaggcatagcataatttttgtcacttattttaaagttcataatagataatttattttgttaaataaaataactttaaaaaattatatactctcatttaacagatttaaagattattattaactttcactctgttatttaaataaaaacccaaagtattgatcattggtgtttaagcgttaacacatcagatcagcattcattatattaaaaattggaaacaaaaatgacaatttctcttgaagatcaaaaaataaatcttgcgttaggctttattattaactcgggaagtataataacgaatcaaccagaaccggctatcgtttcagaaaatattcaaaaatcattagcaaatagtaaagcgacagcaaatagattctctatcatttggggacctgctgtttttcgtgtcggtagtgttaataataaaacaagcgttacagataaaaaagatgatcacgttttattcattgtaaaagatctcaaaaatccaaatgattatcgaatcgttattcgtggttcatggtccatgacgaactggtttgatgagaatttcaatgtaggcacaactgaaaactggtcaatttgggattcaaaagcccccaaagacgctaaaatttcaaaaggaacccatataactttagactatgttatcaaccaaataaagagcaataaccctcccggttatggagaatcattgattgaggcaattgataaaattgctctggaagaaggagtacataatattactcttacgggacatagtttaggcggtgtaatggcctctacgcttggtctgtatttaaagagacgttatattgataaaggaaacaataatattcgtattcatatttcctcctttgctgccccaactgccggtaatgatgtttttgcatcctatagtgaatctgtttttaatggaacattactatctagctatgaaagtcattttctccgggtccataatcgtaaagatatcgttaccctagcctggagcgtaaaaggattagaagaaatcaaggttctctatccaatatcaactttaattgttaacggttttatttcagtcgttaaagataagaattacactcaacttacgcctgatttaccttttactgcacctgatttaaaaccttctacaggtttaattgaaaaactcgtacttcaacatattgatgcttatgccaaagagtacggcatgagttttattgtagttaatgatcgtgctaatccaccaactgattatgatattgttgtcattaacgatggtcaatctcgcaatattagaaaacttttctcatctattattcaagatgaagataatatccaataatttcatcgtattgcctcttgctttaatttaaaccaaatggaaccttgattaaaggttccatttactgccctaccttattactaatgagtcattcctctgccaaaatcgtttatcgtaaccattatcacacaaatgaaattttttcttgacaaaaaaatcacacagtggtagtaaaattcattattacccaacaaaataggaggaatcgagatgattagcagtggatctaactaaaaaaattcagcggggtatgttaaataccccgccacaaaagagacaaaattatgaataaagaaacagaggacatcatgaagaaaatagcaaattatattcaagtagggaaatataaatcaggtgggatttttggagttggttcgaaacaacaaattatagaaaattatttaaaatggaagaatttagttaaggtttctagccttttgaagttaccgactcacgaaaaagaaatcacagaaacaattaaatcaaatttacccgagatatgtgataatgaaataaaagaaataatctcattcttagatgaaaaccatgctctgatggattttaatgaatacaatcaaaatgacagatatagtaggaactatttattttatagatatgcaggggcaatacctagtttagttcaagatagaataaagaaatcaacagttactataattggatgtggtgggattggaaaccatatatcatatctgctgtctacatcaggggtaggaaaaattacacttattgatgatgacacaatagagctaagcaacttaacaagacaagttcttttttcacaaaatgatatagggagaaaaaaaacagaagttttagagagagaattaaataaaaggaattctgaaacaaatatagaaacaattaatatgttcatatcatcaattaatgatttatataaaatacctcgttctgatttattcatagtttcagccgaccacccgtttgaattaattaactggattaatgaattctgtgttaaagaacgacaagcatatataaacattggttatattaatgatatctccgttattggaccattttatataccaaataaaacatcctgcataaaatgtcaaaacattatgccagagtatcacccaaaagatgacattttagagcatatagaaaatgtaaacaaagactttaaagcagcaacattccctagcgttaatggtgtcgcagcatcttatgcttttggggatattatgaaataccttggaagctttggtaacattctcagtactaataaaagaatcggaatacactcactaagcataaaaattgaagaacaatcaatacataaaaatgataagtgtgacgtatgctctcaaaaacaaaaattataatatattataatgtcatatttaattccatgcggatgttagtgggtgcaacatctacaatatttatcttaaatcatggtcttactctagttgatattggattgatgaagactatccaatcatttatatattttttatttgatattccatcatcatatctagctgacaaatttggtaggaaattcgctattattttatcgaccacttttggtggtgtatggctaataataacgggcattgcagattcaaaatatttattttatatcgcagaaatatttaattcaatatccttaactatattaggaggggttttctattcatacctaatagataactcattaaacgataatgacacccacaaaatattgggagaaagcaataaattacaatttctattcatggctatattctcaataataggatctctaataactgattttgatgacagattagtatggctaatagcaggctctggatgcattattctatctgtaagcctttcatggttcctaccaaaatcaattactaaaaatagacaaccaaacttatcattccttaaagaaataaaaacatcaatagcaatgctgaaagataataaaaattatcttttcataacatctatttctctatcatcctctctgctatatttccaaattatcctccaatattggcaaccattaataaattacatcatagaagagcttggtgtcagcatctttttcgggattgtattttctgcaattttattatctcaatcaatatcaggatggataatctcaaaaaatgaagacaacaacaaaaaccatctttatagtatagtaatcctattggtatgtagcttaacgtgcatttatggtgtatatgaaaagaaccatataaccaccatatcgacgattattatgtttggagcaaaccaagtaatgacaacatcattaagatccaactaccaccaaataataccatcagaattaagatcaacatttgactcattcatatctacaattacaaggctgatagcagtaatagtgataccgttaatcgcgttaatcactgagaattttggatggatatatttccctatattgatatcattaattatttcaattaacatcctttgctacttctttataaaaaaacatcacaaaaggaaaccaacatggaaccccaaaagttagaaaccagaagattaatattacatcctttagaaagtaaggattatatacaaattcaaaagatctttcctcagtgggaaattgttcgttatcttgtagcaagcaccccgtggccctacccagatgatggtgccctggaatatataaataagatcgcgctaccatcaatggcaaaaggaaatgcatggttttggactataagaaggagggatgaaccatcaataataataggaatgatatcgctatatgatcaagaaaataataatagaggtttctggctagacccacaatggcaccggaacggatttatgactgaggcggtccaagtcgttactgatttttggtttaataccctaaatcgcaatgtactcagagcgcctaaatccagcgacaatattgcctcaaagaaaatatcaattaaaagtggtatgcgattaataagactagaaaatagagactttgttagcggaagaatgccttcggaaacatgggaaataactcgtgatgagtggaatagaaataactaactaccatcgcgacggcaagggagtgaatccccgggagcatagataactatgtgaccggggtgaacgagtgcagccaacaaagaggcagcttgaaagataacgggtatatacccaatagatttcaagatgcatcgcgacggcaagggagagaatccccgggagcatagataactatgtgaccggggtgaacgagtgcagccaacaaagaggcagcttgaaagatgacgggtatatcataccaaagagatcacatgcgctatatcagcagatgtttttaactttcttatctcttcaaacagcattgttgcttcttcatattctttacgcaaataaccaagccactgtttaatccgagcaacatgatattgcccggtatcaccctgcttttccaatcggatatatttttgcaatagttgaacaacgtcctgccagcacatttttggttcgttatatttcaccactcggctcaaattaggaacgtgaagcgcaccccgcccaatcatgaccgcatcgcagcctgtcacactctggcaattctgcgcactttgccaatcccaaatttcaccgttagcgataaccggaatagagagacgttgacgaatttcaccaatcgcttgccagttaatacgctccgctcggtaaccatgctctttggttcgcccatgaactgtcatttccgtcgcacccgcctgttgtaccgcatcggcaatttcaaattgccgatcaccgctatcccaacccaagcgaaccttaaccgtcacaggcaaatgagcaggtaccgcttcacgtatcgctttcgctccctgataaatcagttcaggatcttttagcaacgttgctccgccaccgctaccattgaccgtttttgacgggcaaccgcaatttaaatcaaccccataggatcctaattcaatcgctcgtgccgcattttccgccagccactgtggatattgacccaaaagctgaatccgtaccaatgtgccggatggtgtccggctttggttacgtaattcaggacaaagtcgataaaaagattttaccggcaacaggctatcgacaacccgtaaaaattccgtaatgcacaaatcgtactcattgatttcactcagaagttccctaaccaaagagtccagcacaccttccatcggagccagtaaaacccgcatcgattaacctctgacgttaggcgatttatgggatacatcatgactgctgctacgctgacgcgaaggtgccccagaacggcgatggctatttttctgccgattatcgccacgtgcctgacgaccgttttggataggttcagccttgatcgttggatctggctcataaccgggaattgccatacggggaatctcccgttttaacaaacgctcaatatctttcaacagcttatgctcatcaacacagaccagagaaagtgcctgccctgttgcatctgctcggccagtacgaccaatacggtggacataatcttcagcgacattaggcaattcaaaattcaccacataaggcagttgatcaatgtccagaccacgggccgcaatatctgtcgctaccagcactctgatccggccatctttaaaatcagccagtgcacgggttctcgccccctgacttttattaccatgaatagccgaagccgttacaccatctttatttaactgttctgccaaacggttcgcgccatgtttggttcgggtaaataccagaacttgctgccagttacggctgccgatcaagaaagagagcagctcacctttacgctttttatcgacaaagtgaacaagctgttcaatctgttcagaagcagagttacgacgtgcaacttcaacactgacgggatcacgcaataacttactggctaagcttttgatatcgtcagagaaagtcgcggaaaacagtaaattttgccgtttcggtggtaatttattcagcactcgacgaatatcatgaataaaccccatatccagcatccggtcagcttcatccaataccaaaatttctacccgggataaatcaaccgcattttgatgttcaagatccagtaaccgccccggtgttgcgactaaaatatccacacccccacgcaatttcatcatctgagggttaatactgacaccgccaaaaacaaccagagagcgcagtctgaggtatttactgtagtcgcggacattttcacccacttgagcagccaattcacgagttggagtcaggattaatgctctgactggccggcgccctttcatctgaataggggaatcatttaaccgttgcagcatgggtaaggtaaaacctgcggttttacctgtgcctgtttgagcactcgctaataaatctttacctgctaatacaacaggaattgcctgttgttggattggtgtcggcgctgaataaccctgttcttcaacggcacgcaaaatatcagcacttaagccaagtgatttgaaattcataaataagaaatgctccagacttcaccattcctgaacgctattcaggggcagttttatgggaagaaaatcagacgtggtaaataccacaaaggaaaaaacacaactgcaatgctccatattttagctattataccagatatactttctgatgatgcaactaaaacaatagctatttacccggtaattttcatgatccataacatttttatgcaatttacattgatttactataagtatagagttaactaatgattgatattttgtttaagtcttttgattatttgcaacaggattcatgtcgatgtcagtcaacaacacccaaaccgccagaggcgaacaagccaaacaacagctactcgaagcagcccttgaaattttcggtaaatcaggactgaccggtgcaacgactagggaaattgcattacatgctcaacaaaacattgccgccatagcttattattttggctctaaagaggggctttatcaggcagttgcccagcatattactgacacaattaagactgagttcacgcatctttttaaggaaattgatgattttttttcatcatcagccccgtactcagcagaaaatatattgaggatgattcatgaaggattccttggcattaaccgcctgatgattgaaaaagagagtattaatatcagccggataatggccagagaacaacttgcaccaacggatgcttataccctaatccataagcaagcacttgtacctcttcacagcagattaaataaactgattgccagctatatcgatgccgatgaacatcagctttctaccatgctacacactcatgctttaatgggagaagttctcactttccgcatggcgagggaaacgttattacgtcagacaggctggaataatatcgggcccgaagaatataaattgattgatcagatccttatccagcatatcgatttattactgaatggactgaaaaaacataatctgaataaataaaataacagggaatatcatgtacaacaaaaaactcactctggcaatattggtgaccgcaattattcttagtgccattttaggcagttactattatcaaggtaaaagtgataaaactttgaccctctatggcaatgtagatatacgtactgttaatcttagtttccgggttggtggtaaactcgctagtctacaagttgatgaaggcgataccattgcggccaatcaagtcatcggccaactggataatgggccatttactaacgccctcaataaagcaaaagccactcgtgatagcactaaagcacgtttagccatgatggaagagggttatcgcacggaagaaattgcccaagtccgttcggaagtggcacaacgcgaggctgcctggcatttcgctaatagtttcttcaaacgccagcaaggtttgtggcaaagcaaagttatttcggctaacgaattagatgatgctaaaacgaatcacaatcaagcattagcggctttacaagccgctaaagataaactgaaccagttcgaaaccggttatcgtaaagaagaaattgcagaagctaaaggccagcttgctcaagccgaagcggctgttgctcaggctgaattggacttacaagatactcaactgacttccccctcatccggtactatcctgacccgcgccattgaaccaggcactatgctgtcagccggcaatacggtgtttaccctttctctgactgatccggtttgggtaagagcctatatcgctgaaagccatctcggacaggcaacgccagggcgtgaaattttactttataccgacagccgcaaagataaaccttatcacggcaaaattggctttgtttcacccaccgccgaatttacaccaaagaatgtagagacccccgatctacgtactgatctagtctatcggttgcgcattattgtcaccgacccggatgatgccctgcgtcaaggtatgccagttactctgcatttttctgattcagataaataaggggctgtcatgagcagctctgcatatacgataaggttagagaaagtcgaaaaaacttttcccagcctgaataatcctgcggtatccagcctgaccgcagagatctacggtggctccgttaccggccttgtcgggccggatggagcaggaaaaactacgctgatacgcatgttagcgggtttactgaaacccgatagcggttctattgagataatggggcttgacccgataaaagatggcgtacaagtgcgttttgaactgggctatatgccacagaaatttggcctgtatgaagatttaaccgtattagagaacctgaatctatatgcagatctgcgtggcgtactgggtgacgagcgtaaaaaaacctatgagcaactccttacgtttactgatctgacccgttttaccgggcgactggcgggcaaactttcaggcggcatgaagcaaaaactggggcttgcctgtactctgcttggcaaacccaaagttctgctgctggacgaacccggcgttggagttgacccgatagcccgccgcgaactctggcggatggttcacgaactggcagatgatgggatgctaatcctttggagtacttcttatctggatgaagctgaacagtgtcgtgatgtcctgttacttaatcaaggaaaactgctctacagcggacaaccacaaaaactgacccaaaagatgtccgggcgttcttttctgcttggtgccaaacaggattcccgtagaaaaatgctgcaacacgctcttaccttgccacaagtaaccgatggcgtgattcaggggaaatatgttcgtcttattctcaaacctgatgcctctccgcaagaattacttaatcagcttgaactgccagatgctgaaatcattaaagccgccccccgttttgaagatgcttttatcgatttactcggtgggggttccacccgccattcggaactggcagagatcatgccacgaattgctgctaacccggcagaaacagttattgaagcacaggatttaactaagaaatttggcgattttgctgccactgaccatgttgattttcaggtgaaacgtggagaaatctttggtctgcttggcccgaacggtgccggtaaatccaccacgtttaaaatgatgtgcgggctcatggtgccgactggcggtaaggcgctggtattgggaatggatctaaaaaccagctctgggaaagcccgccaacatttgggttatatggcgcagaaattttctctgtatggcaacctgacggttgaacagaacctgaaattcttttccggcatttacggcctgcaagggcgcaaacaaaaagaaaaaattgatggcatgatcgacgctttcaatctcaaatctgttttacatcaaaccaccgaccaattgcctctgggatataaacagcgtcttgccctttcctgcgcactgatgcatgagccagatattttgttcctggacgagccaacttcgggggttgatccgcagatacgacgggaattctggctacatatcaacggcatggtagataaaggcgttaccgttatggtgaccacccactttatggatgaagcagaatattgtgaccgaatagggttggtattccgcggtaaattaattgccgccggaacgcctgatgacttgaaacaattggttgctactgatgaaaatcctgacccatcaatggaacaggcatttattgatctggtcgttaattatgatgaggagctacaacaatgagtagcccaacgcaacatgctccacagcaagctgtccgcttctcttggtggcgattgaaagcactttgtgtaaaagagacaaaacagattttacgtgatcccaccagcggattaatttctattgtcattccattgattctgctgtttatctttggttacggtattaatctcgactccagtaccgtccgccttggtattctggtagagcagcaaagtgaagatgctcgtgaattaatacaggcttttgccggttcaccctatattgaacccaaaatcagcgataatcgtcagcaattaattaatatgatgcaatcaggagaaatacgtggactggttgtcattcctgttaatttcgatgcgcaacttgctcgtcctgatggtaaagcacaaattcaagtcattactgacggcagtgaacccaatacagcaagttttgtacaaaattatgctaaaggagtgtggcagatttggctacaacaaagagggcaagatcaggggaacgctgttaatccgttaattgatatgcaggttcgttattggttcaatccagcaacaattagccaacatttcatcattcccggcgcaataaccattatcatcaccgtggttggtgccattctgacatcattggtggttgcccgtgaatgggaacgcggtacgatggaagccctgctttcgactcaaattacccgcaccgaattactgctttctaaactcttgccttatcaagtgcttggatcattctccatgctgctctgtatgctggtggcaatatttgtgctggatgtcccctaccgaggctcgttatggatattgtctgcaatcactagcctttacttggctacggcccttggtattgggcttttgatctctacggtgacacgcaaccaatttaatgctgcaatgatagcgctgaatgtcgcttttctgcctgcgattatgctttccggcttcatctttgaaataaacagcatgcctgcctttattcaggtagtgacctatttcatcccggctcgttattttgtcagtagtttgcatactctctttctggctggaaatatcagtacggtactggtgataaatctattattactgatcgcctccgctattgtgtttattggcctgacagcatggaaaacccagcggcgtctggattaagaaggaattagcatgttttatcgtctttacactctgattattaaagaattgcaatctctactcagagatccgcaaacacgggctatcttagttatgccggttatcttccagatgatcttatttcctttatccgcaacccttgatgtgactaatgcaactattgctatttttgatgaagacaaaggcaaagcctctattgaactcacccaacggttggcaaaatcaaaagcatttcctgacgtgctattactgaaccattcacaagaaatacaaccggtaatcgatcaccaaaaagccttattactggtacggttcccacaagatttcagtgctaaaattgccagtcatgacccggtttccctccaagtattgctggatgggcgcaactctaacagcgctcaaattgccgcgggctatatccaagaaattgtccttaactatcaacaggagctgatgggtaacctgccgaaagccaataatagcgagttggtgatccgcaactggtataaccctaacttggattataaatggtttgtcgtgccctctttggtggcactgattactacggttgggatattaacagtcacggcactgtcaattgcgcgcgaaagggaacagggaacgctggatcaattactcgtttcacccatgaccacctggcagattttcattggcaaagccgttcctgcggtgattgtcgctacctttcaagcaactttagtgctcgccattggcatattctgctatcaaattcccttttctggttcactggcgctgttttactgcgctatgctgatctacagtttatcgctagtgggatttggcctgttaatctcttccctttgctacactcagcaacaggcgtttattggcgtatttgtctttatcatgcccgctatcttaatctccggttatatttctccggttgaaaatatgcccggatggttacaagacatcacctggattaatcctatctggcactttaacgacatcaccaagcaaatttatctcaaagatgccgatttcacggttatctggagaagtctatggcctcttttagccattactgccacaaccggtaatcttgcctattggttatttagacggaagattgcttaagtcaaagaatagaaatgaaatatataacctaccaccaaaatatcggtggtagacacctgtaagcctacgaaaagtcagcgtatttttatacagatattaaccaattgagccaattgggctgatattaaggagaaaccagactttagcttatacccgtcatctttcaagttgcctctttgttggctgcactcgctcactccggtcacatagtttgctatgctcccggggattcactcccttgccgccgcgatccatcttgaaatccatagggtatacatgacaatgatcatttctcagattttttattaactttataaaacagaaatagtaaaaatgatgataacactattatcgttaaaggcagaatataagattctttatatgaaaaaagaccggttataccaccaacaaacgcggctatgatttgatgaataaaaccaattaatgccatcacagaagaacctgttacaggtgttttatctgaggcaatagataaactgatcgggtagtttatcgcttgtccaagaacaactaagaaataagcactatatagtattatctccagaatgccccccacaatactcccaacaaacataaccacaccaccaataagaattaaaattattcctattttcatgagattagctctaccgcaatatactatgtatcgatttaaaattatcgctccaagtaaataagacatactgattggaatgcctataataccatattggctttccgaccaaccaaaattaaacttaaaaatcaatggagccataatattgaatgatataattgcaccatagccaattccaccaatgaaaaccgcatatatataatatttattttttaacaaattgatatatttatatactgaatttttttcatttttactatgattatatttttttgctgataacaacagcattgagattaatgctccaaaagccaaaacataaaatatagatttccatcccagaatagtcagtataacagaacctatcgattgcccaatgcccaaagaaatgacaaatgctatagataagtaagataatgcttttgccaactcatctcctctaaaattatcacgcaaaattgatcgggcaataacagaaactccaccagcgccaacaccctgaaagaacctaattaaaatcaaagaataaatattagttgatagcgtcacaccaacactacatgcaaataatataataagagcaaaaaacattgatttctttcccccccaaatatcacatattccgccccacaccagcattaatgaagccattccaattaagtatgatgaaagcatccatgaagtatggtttatatttaagtgtaaatctgacgcgatttcaggtacagcagggagatacatggtcataccaagttgggctataaaaatggatatacatggtattaataataaattttttttcatttttattaaccgataattgtcttgtacacttggaaaataattttaataagaagatttaatatggggtatgagatttttatcccctccccacaataaaattgtcttctttacgctacacttattagggagtttaaagtggcactctcttgatataaggactctcttaagaaatcagtaattaaataacaaaatcgtttaattaaatcactatccatatcagctctgagagtcactctaattgcagcccgcccttgaggaacgacagggaaaaaaactgacgatgtaaaaaagccattttcagctagaaatgcagccgttttatttgccaacgaagcatcaccacattgaattaatcgtattgcagtcgaactgccaaattgatctgtagttattaaactgtcaaataattgtatattttttttcaatttttcctgaagctctttaagctcaggcttgtaatgtatcctaattgaagctcttccagctcctattgccgctgaatttaagctctgagaccaattactcgggccaccatagcgatgaatgagtttcttttgattacgactacccaacatgactaaaccaccactggctgcaaatgatttagccaaagaagcaacgataatggagtcctcatccagctccttaatatgtgaccttacatatccacagcctttatctcctatagcagataaagcatgtgaatcatccaagtaggtgaataacccatatcgctcttttaaatacattattgaatttatgtcagcaacacctcccatactatatacaccatctgctacataaaccactttcttatgtatttcacatatatcttcaagataacccatatcgttatgtggggctgttatcacttctgtttcatcagcacatgatggttttaaatgattcatagaataatgagaatatttgtcaaataccatcacagggtttacgtttccagtgaaaacacccgatgcaagcaaaggcaatatacctgaacttgcagaactacatgataatgtacttaaacattcggcattaaataacgctgacaattcccgttcataatcttctaagatggaaagtttacacctattcttcgagttaggtatacgaagtgacccagtttcttttatcgcgtctatagcaccatttaatatatctttatgataatccagaccaagatatgatgtagtacagaaatgatgaaactctcggccatattggtctgtcatataatttataccagatacctttacatctaaacctgatatcttattattttctgcattttcccaatcactttctgagatgttaataattttcttgtaatttataaatttattattgttcatataataaaccccattgaattctcttgtaagaatatcgtgaatcatggctcctatataataaaccttccctttgtagcaatttatattaccatgaatcaaaaatcaattaatcataaataatttatataaaatccatattaaccattataattacactacttatttaataataacaaaacattattatatttgaagtaataatgtctcagtaaataacctgagatttgcttaagaagggaattaagcgcctgagacacgatcaaagcttttgctaaagaaaacaaaatagtggagatcctcaggcatgtctaaaattgcttatacattccaacctaaaaaaaccgagcttgaatttacgggattgtgatatcgatatttttaaacaaagctgaggttaaatatgaattacgtggagttaatccgcattcaagacatgcttcatagatatttctcaccatcaactgttaaaccaatttaaaagaatcactcggtatgcaaaataaccatacctgttattcagatattattaattccataaatacttttttaatataagcgccagcacaattcataaaaatatatacccgtcatctttcaagttgcttctttgttggctgcactctctcaccccggtcacatcgttatctatgctcctggggattcgctcccttgccgccgcgatccatcttgaaatccatagggtataattgtgaatttttagatcaataaagcaatataattctttgttattagaaaataagcctaaaactcagtgtagctaaagttactttagctacactgaaaatatcaattaacggcgatcgccaaaaatacgcaataacatcaagaacatattgatgaagtctaaatacagcgtcaatgcaccaacaatagaaaatttacgcaaattctctttgtcattcacatccaaatcttcacccatctctttcagcttctgagtgtcgtaagcggttaagcccgcaaaaataacgacaccaatgtaggttaccgcccacgtcaacgcttcactctttaaccataagttaatcagagaagccaaaatgatgccgatcagccccataaataagaagctaccaaggccactcaggctacgtttggtggtatagccataaaaactcagcgcaccaaacatcccggccgtcacgacaaaagtgctcgcaacggagccaatagtatagataacgaaaatactggaaagcgtcaggccggtcagagctgaatagagcataaacaaccctgtggctaacgaagctcctatgcggttaatcatgccagagaggacgaaaaccaacccaaactgagcaataatcaacccataaaatagtattgaatttgagaaaatatataaaacaacattctgattttgtgacacataccaagccacaaacgcggttaacaacagaccacaagtcatccaaccataaacctgggccatataagtttgtaggccggttccagcttgctggattatcgaaccattagagcgtggatatcgatccatgaagcttaccttttataacgatattaaagacctaggttgttcagtaccaacaacccactcaagttttatacattatcatagaatataaacaaaacaattcactattcaataattactcatatagtaatccttttattcaatcctttttcgaagcgtttcgcagaatttaaccaatactttcattaccagcgtttcacggcttcctgatcgctctctcgggattcaacccaacgttcaccatcaggcaagaactcctttttccagaaaggtgcctgcgttttcaaaaaatccataataaattcagccgcttcaaaagccatatgacgatgagcaccggtcacacccacaaacacgatctcatcacccggatacaatgtaccaacccgatggacaacactgattcgctgcaacggccagcgactgcgtgcttcggtgacaatacgccgtaatgttttttccgtcattcccggatagtgttccaatctcagcgccccgacattatctcccaaattatgattgcggactttgccggtgaaagtgacaatagcaccatcttcatcacattgagcaagccattgatattcatcccctagcttgaaattcttcggcccaacgaaaatgcgggtgttttccatttattatcccccagtcaccggcgggaaaaaggccacttcatcgccatcctgtaatcggtgcccgccatgaaccagagattggtttaccgctgacaacaattttccattttccaatgccaaagcccaacgttctccctttgatattaacgccattctcaaactgtcaacggttgtgtaacgattatcgagatccagtgaatcagtacctaccagctcacgtacctgagcaaaaaacaggactttaatcattgctccaccttaaaatggcctaatttaccaccgattttctccagtaaacgcactggcccaatgaccatatctttctgtaccgctttacacatatcgtaaattgtcaaagccgcgactgacgccgctgtcagggcctccatttcaacaccggttttcccagtcagacgacaacaggattcaattctgacccggttatattttgtctgagcttccaactggacttctactttagtgagcagtaatggatgacacagcggaattaattcccatgtgcgcttggctgcttggatacccgcaatcctcgcggtggcaaatacatcacctttgtgatggcgaccttcaataatcatcgccagtgtttccggcttcattccaacaaacgcttctgcccgtgcctcgcgtgatgtttcagctttagcagaaacatcaaccatatgcgcttcaccggtagaattgatgtgggttaattgagacattctcagctcctgaaaaaacaacaatatccagacggtaaattaaccgccgatgacggaaagatttggcgtgataccgctgtcaccttgatgaagaaaatgggtttcccgtttatgccgcaatccatcctgaatacgcaatttcagatcatcgagttgtttttcactcgccaataagtcacgcagtggtatcccctgttcaccaaacaggcataaatgaagatgacctattgaagaaacacgtaatcgattacaactctgacaaaaatttttctcataaggcataattaaacccacttctccctgataatcaggatggctaaaaacctgtgcagggccatcactgcgtgaacgttgaagcaaatgccagccatcgagcagcaggcgttcccggataatttcccccgaaatgtggtattggcgaaacatttcaccaccgtcacccgtttccatcaattcgataaatcttagttgaatcggacgatcttttatccaatgcaggaaagccgacaggctgatatcgttaacatttttcatcagcaccacgttgactttcactttactaaaacccaccgcaaatgctgcatcaataccacgcatcacctgaaaaaatttgtcctgcccggtaatcgcatgaaattggcggggatcaagcgaatccatactgacattcactgcggttaaacccgcctctttccacttagcaatatctcgctccattcgataaccgttagtggttaccgcgagggttttaatcaacttattttcacgtatgacggaaataatatcggtgaaatcgcggcgcatggtcggttcaccccccgtcaaacggattttctcggtacccagatcggcaaatgcccggccaacaagacggatttcgggtaatgtcaaaaaggagtgatgtccacggggtttataaccatccggcaaacaataagtgcaccgaaaattacatacatcggtgattgatagccgcaaatagtaaaatttgcgggcaaaagcatctgtgagttgtttcaccataacacctttccaaacatgggagacgtgggcatttctgcctcacatcctggtgactcagtggtcacggccaaaacatcatatcgctgtgtaaaaagtgacttagatgcagaggctaggagttaattccatagggtatatgatttaatgtaaaacgaccttctgtgatatggattttagcgcttaacaaagaaaaatgcgaatacctactttcgttatataattgaatatataccttatggatttcaagatgcatcgcgacagcaagggagcaaatccaaggacaatttctatttgtgatcagttaaaacattgtacccaatcataacgtttgttcggttaatcgtgttttataataaattacgctaaaattattcagcgaatatatgctcagtcagtaataggaattctatgcgaaaccgcacattagccgatttagatcgggtagttgccttaggcggaggtcatggccttggacgcgttatgtcctctctttcatcactaggctctcgcctaacaggcattgtcaccacgacagataatggcggctcaaccggcaggatccggcgttcagaaggtggtattgcctggggtgatacccgcaattgtttaaatcagcttattaccgaacccagtgtcgcgtcggcaatgttcgaataccgtttcagtggcaatggcgaactggcagggcataatctggggaatctgatgcttaaagcgttagatcatctaagtgtcagaccccttgaggcaattaatttaatccgcagtttgttgaaagttaatgctcatcttattccaatgtctgagcagcccgttgacctgatggcgatagatgatcaaggcaacaccatttatggcgaagttaatgttgatcaattgaattgtattcctcaggagttgatgctttatccacctgcggccgcaacaaaagaggcattggatgctatcactcaagcagatctgattattatcggccctggcagcttcttcaccagtctgatgccattgcttctgcttgaagatctcacccaagcactgcgccgtagcaacgccaatatgatttatatcggtaaccttggcaaagaactcagtgccgcggccgctgaactgacactgaaagataagctggaaataatggaaaacaaaattggcagccggataattgatgcggtaattgttggcccgtgcacaaatatcagcgagcttaacgaccggattattactcagcaaatactcgaagcacaggatgttccctatcgccacgaccgtgaattattgcatcaggcgttagagaataccctgcaaaaccttgggtgacgttccctccgtaaagaaggtaccgcaaaagctctcctttatcagctaagattgaggctcccattccaaacgcggttccttcatgacgacatttacgacaactgatgctttccattcacaccggatgtcagaaaaatctacccaaaattgcggtttatttatcatgcggagaaagagcggcattttctgccttacgtagcatccagagactggagttccaataacaggcaataaatctctgcgggtttattttcaatgctggccttttgcgacaccctcgcattaggccaggatttacgaggcaattgttaaaaaaagccttttttatctatcagcgtggttttaaaagcgggtaaaaagtccgatgtcatgctgacattggaagagaaaacgtaacttgaaagatgacgggtatatcggtaaatcagtaatactgcccttcacttattttatatttacttaaccaaccatgactatttaaaaacacaaacagggagaggttaaatacttcattcaacagactgatttaacacaatgaatcaaatttttcagtagcgtgattaatgacatttaatcgaaatttactaatcattaaccgagagttgaaaagcaataataacgtgaaataacatcaatagaataaactgacatttaagtattttctcactatcattttacgaagcaatcaataaaaatgcgattaaagaagagataaaacgattaatttagctgaatttaagcactaaaaaggatttatcctaaaaaaacattaatggtatctctatactaaataacttttcataattataatacactcactctttttattctctgctattcctgtagggacatgaatttaaaaacgttttcactttctcaagcaattgccacatatactgacagccatgatttcgtgtcaccgtttcatgtaaggattgccacagacgctcaattttattcagccagggtgaataaacaggtaaaaacaacagattaaatttaggatgacaagccagccaatctctgacccgtcggcttttatggatactgtaattatccaaaatcaaagtgagggtttcagcatgacaatactggcgttcaagttcttccaatacattgataaataactgagaattcttatttaacccgtcagcataagtcacttttcccgtttgaacattcaggcaacctgcaaaataatgtttttggttttttcctggtgtcactatacgtttctgttgcccttttaaataccagtcagccccgatttttggattcagctcgatgtcgacttcatcttcataaaaaacgggatgtttttctgaacacgttgacaatgcctcggtaattttcgccattttttcatggtactcgggatcgggtaatttaagcgtcggggctgcccttcgccacacgatacccattttatgtaagtaacgatagaaggtactgatggataattttatgtttaataattcattgattttaattataaaaaactcaagactccagcgagaacgcaggcagcccaattgctggggagaatattgcaataaaaaagacagtaaaggataaagcgggattaaattccagacagcgggtctgcccacaggcaggcttttgagtccttccagaccatataaagtcaaccagtttatccagcgatagacagaagaacgactggcgcaaagggttttggcgaccagagagacagactcgcctcgatgcagcatcaatatggccatgagcctgcgagcataatctttatctcgggtgttctggataatttttttcatctggcgtcgttcattgcggggtataggtgctatgataggcataactcagtccgtttagtggtttgggattatctacaattgatcagattgcaaaaattggactgagttccctccaagtgttctactattttgaaaagttatttagaaaactatttattagtgatttaataaagaaaaaacaaagggtgatgttctataaaaacccacagaattgtcagtaaaacaatgtcggtaaaacagtgccagtaaaaataaatcggatatgattaacgttcgtttaaacgttaaaccacgatatatcataatgtttaaatttagcaaaaatcgaatatccaaaagataaaaaaagattaaaaccagataccgattaaaatcataggttaaaaaaataacttttaatcacagtttaaaacctgctccggttttatgggtatttcaattaaaggctttagcatttgatagttatgaccgtacctttaatcgacaagcgccggtcgggcaaccacaattaacaagatgcccctccagcgcgacaggtattccttgtatattaaacaagttagaaccttccgcaacagcgccagtttgtttacaggcgggacaaaacaccgggtcacctttacaggcaaccgatagttgttgatttaccaaatcggaaccctttaaaacctcacctccggttgttgtggtatcacctttaaggataacttttttactttccactacactgcgcattatttactccgttgtattttccgtttctcgtattaaatgccatgcagttgtgcccggttctgcaccttcaacatcaaaagccatcgccccctgagcaaagaagtactgcttgcccggcaggctctcggtttgccagatcccgctgaccagtgccggatgatcacctctcaacggggttacatgcagcggtccccggtcataacgggcataccaggccagggtagaagttgaattaaaatgcccttcaccatagaagtgcaatgaatggccttcacgaggtatcacccgtatcggacgtatcagttggttaatggcaaaataactctccgggacactgcccgggagtggcgttaagtccgggtattgaccggcctggataatcaggccatcacggtaagaagtaatcaccacatcccggtaggggcgcagcacctgacgtatccagaattctccacccagtcggtttacaaagcgtttggacagcagggtgatccaattaatgccacggatggagtgttcatactgtaataccgcagtatgaaccgtagaattgacttgcagggaggggtaacgttgcgctagctggtactctaaaggaaagtagtcatggtaatctctgggtagggccaagctgtagccacagtcaccactgtccggttcgagttgttcacacagaaaatccagccaggccataaaacgagccatgccgtcttgttcttttagataatcccaaggcagtgtcaggcttaggtaagagctatcatcgtcaccatcatcctcatcagaatccagataacgcatcagataacgaggggcttcatagatatttttagcatcactgactacccaactagagggctgattctttttctgattaagaatggcctcttccactttggcaatattttccggggaatatttttttagtccttccagctcatgactgtgaaaacgcagatgagtaccaaattcttcgcgaaagcggcggtagcaggccagaatgcgctgttttttctcctgagtatagccttgtttaaaaaacaaggtgatagaaatcccaagacgagaaacggtcagcccatcgccattgaggaaggtaaacgcggccagttgtgatttcaactgggcaaagtcatctacagtttccatcattttctccgtaagtgatgagtcggtggataatctgttattcccacatatttgccgcttcccgtatcagatgccagatagttgtacctgtctctgcaccttcaacatcaaaagccatcgccccctgagcaaagaagtactgcttgcccggcaggctctcggtttgccagatcccgctgaccagtgccggatgatcacctctcaaaggggttacatgcagcggtccccggtcataacgggcataccaagccagtgtggaaatatcatcaaaatgaccttctccataaaaatgcagtgaatcaccttctcccggaacaaaacgtatcgggcgtatcaactggttaatggcaaaataactctccgggacactacccggtagtggcgttaagtcagggtatttgcctgcgcggattatcagaccattggagtaagaactgatcaccacatccgggtagcgtgccagcgtgcagcgtatccaatattctccacccagtcggtttacaaatcgtttggacagcagggtgatccaattcatgcttcgtatggaatgggcataatcgtccagtgtggtgtgaacagtggaattgacttgcagggaagggtagcgcagggccagttggtactccaggggaaaataatcatagtagtctttgggtaagaccagacagtaaccacaatctccccagtcaggttcaagctgttcacacagaaaatccagccaggccataaaacgagccatgccttcttgttctttcaggtaatcccagggcagcactagactcaggtaggcgctactatcgtcaccatcatcctcatcagaatccagataacgcatcagataacgaggcgcttcatcttcgtttttagcatcactgacgacccaaccacaaggctgattttttttcctggcgagaatgccttcctctaccttaataatattttccggtgaatatttgcttaaccctttcagtgaatgactgtgaaaacgcagatgagtaccaaactcttcgcgaaagcggtgataacaggccagaatgcgctgttttttctcctgggtataaccctgtttaaaaaacagggttatcgagagacccaggcgggaaacagtcagtccatcgccattgagaaaaagaaaagaggtcagttgtgatctcagttgggcaaagtaatctacagtttccatattttctccgttaattatgaagcggtggcaaatgtcacactcgccaatattgccaagacggtggccaatgcagcggcgcttaccgcagcagcagcggctaaaatttccaccagtgcaatcagcgcggcagcgacggcaagggtgacaaggataacaatggcaacaccggcaataatcactaccatttccagcattccttcacccacctcttttaatatctgcatccagctaatgttttttagctcttccagggtgatgtccgaaccctgttgcacagtctgccaccgggcttttatctcactctccgtccaggtcacgatttttcccgtttgtgcactgacccaggaaaacgcatagctggcctgatggcttatcgggtcaataatctcttcacacacccacttcccagcttgatttaaccatgctccaaattgagcaaggagttcgcgggtactgtcgcggatataatccaacccttgttctgttaggccagccacctcctgcccgaggataacccagtcttcatagctgggtaaaaaagaccagggagaagtactgaccagcgggagtttttttgtcaacggctgcggaatagtccccggcataccctctgcgggaggagcgggtaaagcttcatcatcaggaggcgaaccgggcagcagcggggccagtgggatcggatttttatagtgttgggaactgggctgataaagttttcgccatgcttcatcatactgcttttgctcttctgtgcggttatcgtcgacacgcatcaccccgaagcgagagcgggtcgcaatccggatataatctttttcttgatcctcactaagcttatcccccggaaatttcacctcaatcaacatttttaggttatcggggtgtacggagccatcaaagtaagtagcatttctacctggccaacggagaacttcgtctttaaccaaaataatatcgggccgacggatacgtttaacaccaaatttttctacatcgtcggcagaaggccgggcaaatgggttactggattgcggtaagttatcactataacgctgtttagaggccagactggtcgccagcatgggcagaggtacatctttaggccctcggatagcaaacaccacttctgctttatagggccacaggaagtcatgcttaagctcctcaaccttaatcaacccactcataatgacttgattaagaaagcgaatagcgcccagtttggtgataatcattgccggcaggcgcagagcgtattcggcttttctcgccagataacagggatcttcatcggcaggaaagacccctatttccatcgtacagttaattgaggtcacggccgggcacatcttgccgctgttggatatcgtcatacttattcctccataaattccatcacatactctaccggcgtgttatcaccgacttcgcataaggttttcttcggtttcggtgaggcttccggtgaactcagttgcagattttcttccgcctcactctgtacagtcaccgttctgccctgcgcatcggttttaccggaaagggtctgaccgccagcagtggtaatggtatagcgggtatgcgccagcggcttaccgctctgttcactgagcagggtatagcgggcggagtagtcaaacagcgcaccggcggatttcttgccggtaatatggtcagtcatggtgatgctgaccccttcgatacggatattgcccatcgggtcaataactatctgcccgcctgcgttcccaatgatgatttgcccgctttcagagtgcaccgtgatatgtttacccacggtaatttgctggttatcggcgacgtttaattgatggcttttaccaatggaaatggcttgctgacctttaatagtcaccgtttgattctgaccgacttcaagcgtctggccgccctgtacggcttcatcatcatcgtttttaattatcgccgtgcggttatgcgccacttctgtttgctggtcatggcctatctgcgtggttttatcccggagaatctggctattcatatcccgctgagcatgaataaacacttcctctcttcctttgttatcctcaaagcgcagttcattaaatccctgccctccaagagtccgggttttaaaagtggtacgggttttctcccgcggtaaatcaagaggcggacggttgaggccgttataggtacaccccgtcacaatcggacggtcgatatcgccgttgagatagctgacgatcacctcctgcccgacgcgcggtatcgccataaaaccgaaaccgttgccgttccagccttgtgccacccgtacccaacaagacgcgttgtcgtccgctttatcgtaacggttccagtggaaatgaatccgtatcgcgccgtgttcgttcacataaatctcttcgcttcccaccccgaccaccgtggcaacttcatcaccgtccgccaggggtttgtagcggtaagggggccgccagtcctggtttccgggaataaaggcgacctcgttggtcagtgttgtcccttcgcctccgtcgtttgacgcgacaggttgccacccatgatgcgtgacagagatcacctgccagcgggcgttcatggcctctatgggatgggattgcagggtaaaaattttgcccggccgaagccggatacaattggttttggcggtgccgactttgctgtagtttcgtaactgttccagccgcagttgggtaaaaggttttccttcctcgtcccactggaaacgcccgtaactttcaaacaccgaatggtgcccgctatcgtcggattgcttctgatgctcaagagaatatttggggttaagaaagttatggtctttctggatcgtgccattcgaacacaggtattcgccataactccactggtacgccgtggtatcggtctcgtccgtttcaggatgcgtattgtaagtcagatcgatgtccgcctgcatgcccaggcggcaatcacagaacaacgtctgttcttcctcaaaccagaagataatgccctcttccgccgccagccggcaccagaaatcataggcggattcgcgtttttgcgtggtgtattcccgttcgacatggcgtttatagagcgtatcgcgggcaaagaaaatataatgctctttaagcaggatcgttaagatttccggtacagacttccgatggaaaatacggctatcctgattaagcgtcatcaaccacattttggggcggacagtgaaaatataaaaagtgctgcggccatcggtattaccctgttcagcgccggttatcatgccattaatggtccgttcggtgacgccattgcgggtaatggtcagtgacgcgctgtcccccagctgttcattcaggggaatgtcatcacgtgagctcaccacctttaacgtcaggcgataaagctgcgacagttcttcctgtaaagtaaattgcgctacctgaaaggtggtttggggcagtacgccaattcggcaggtgaaaactaatccatccatatttgaaaccctacataattgaaccattatcctgcaacggggataacgcaagaggctattaagcgagtcattacatgcggctcttttaaatagcgccggtctgttccgtggtaaaaaaatgacagcgtaaaatagccatcatttaatacgtggcgttagagagaacaatagaccgcttccagctaagtaggatggagtggagacaaataacagagaatttcgctctctaagtattatgaccacaagagcacgatatttatcagatgaatatgaaaagaatgtgattaatgtcacatgaaatggctaattaatcgctattaattccgatttttcatattgaattctttaattaatacatcgcctaatcgctcctttttcaatcgaaaaatttaggttataccctatggatttcaagatgcatcgcggcggcaagggagagaatccctgggagcatagagaactatgtgaccagggtgagtacagccaacaaagaggcaacttgaaagatgacgggtatatattgaagttcgatatttagcctgttatgggttgtcagccccaataacaggcaataaatctctgcgggtttattttcaatgctggccttttgcgacatcctcgcactgggcaaggatttacgggacaattgttaaaaattggcaataaattgctcacgcaatgcctgaacctgatcccgaacactagccgcctgttcgaattcaagatcctgcgcatgctggtacatcttcgcttccagctcgcggattttgctttccagctctttggcagacaggttgctgaatgtttccgctgtggcaaccgctttacctctgccctttcttttaccacccgctggctgcccaatttgcagaatatcattaattttcttattcagaccttttggaacaataccgtgtttttcattaaatatctgctgtttagcacgccggcgttccgtttcaccaatagcttttgccattgaatcagtgatcttatcgccataaaggatcgctttaccatgcaggttacgggcagcacgcccaatcgtctgaattaatgaacgttcagaccgcaagaaaccttctttatccgcatcaagaatagccaccagagaaacttctggcatatccagcccttccctcagcaagttaattcccactaatacatcaaactcacctaaacgaagatcccgaataatttccacacgttcgacagtatcgatatccgaatgcaaatagcgaacccgctcaccgtgttcttccaaatactccgttaagtcctctgccattcgcttagtcaacgtggtaaccagcacccgttcatttttcaccgcccgaatacggatttcagacagtaagtcatcaacctgtgtcgctacaggacgcacctccacttccggatcaagcaaaccagtaggacgcaccacctgttccaccacatcgccactggatttttccaattcatatttgcccggcgtagccgaaatataaatggtctgtggagccagtgcttcaaattcttcaaaccgaagtgggcgattatccagtgcagaaggcatacggaaaccatattccaccagcgtctctttgcgagaacgatcccctcgatacatcccaccaatttgcgggatggtaacgtgcgattcatccactaccagcaaaccatcagcagggagataatcaaacagtgtcggcggcggttccccttcagtgcggccagagaggtaacgggaataattttcaatgccggagcaataacccaattcattcatcatttccaaatcaaattgagtacgctgcgtaatacgctgttcttccagcagcttaccatttgccagcaataccttacgccgctgctcaagctcaattttaatcgcttccattgcctgaataatacgctcacgcggagtaacatagtgggttttcggataaacggtgtatcgtggaacatgatattgaacctgccctgttagcggatcaaacagtgataaccgttctacttcatcatcaaatagttcaacccgcagggcatgctcatcagattcagccggaaagatatcaatcacttcaccacgaaccctaaatgtccctcgctggaatgcctgatcattacgagtatattgcaattcagctaaacgccgcagaatagagcgttgatcaatcatcataccgttggtcaggtggagcatcattttcaggtaactatcaggatcacccaaaccataaatagccgatacagacgcaacgacaatcacatctcgccgctccagcaaagcttttgtcgcggacaggcgcatttgctcaatatgttcgttcacggaagcatctttttcgataaaagtatcggaactcggcacataagcttccggctggtaataatcgtaataggaaacaaagtactctacggaattttctgggaaaaagtccttcatttcgctgtaaagttgagccgccagtgtcttgttcggagcaagtaccatcgttggtcggtttaaattagctatcacattagcgacagtaaatgtcttacccgaccccgtgacccctagcaaagtctggtgggcaagcccatcttctaagccttcttgtaattgacggatggcctctggttgatcaccccccggttggaagtcagaatgtaatttgaacaccttactcatcggtatctcactttcctaacattgattcacatataatactggatataaaaccagcttcaagttggttttataaaaacggactcaaataggtcacttccctatcaattaaacattcgttgatatcaaaataaatcccattttatccccaaaattatcttgatttttctattttctatatgattggctgaaaggtgacaacatgggacatcatcacaggtcaggcaggtcttgattttagttatcttattgatatttaatacaattaaaacaaagacgagaataacatcaaccttgacgaaagccgcgtactttcttgcgtcgcgtaacttttctaagtctaatacacaaggttatccacaggaatagtggataactctacaaaccctattaactgtacgaggttgcaacatcatgccacaaaataggtatcctctaccgataaaaatttttactatttttttaacctttatctcaatacttcctctcaaaaaaatgaataaatttgctgaaaaagtaagaattttctcatagaaattaaatatcaataaattatattcgttcaatattacccgcattaaagatagataattgtctattttttctgtagactgagcgaaaaaaactgtcttttctgcaccaaacaacagtaaacaatatggattagattagaatttttattcaataagaagtagccagtgaacagtttccgtatgaaatctgttcttcaagaggggagtcgtgttttacctaagcggaaataggatgctctactttcagcaatagcaggctcaagatcatcaatagcatttttgactatgccgatataagcaataccgatataaacaatgccgatataaattataccgataaatatttacccaaaaaaactagcttaattggcgtgagtaaaacccgatttttaattaggacattaatatatgtccttgataaattaatgaattcacatcaacatatcctctattttacaaaatgagctccatcgcgaccgctcaaaaaaaatgatagatacataaatatcaaatcgacatagccttcgtaaaacgtccaatattctgctggctattttcgatcgaaaaacttactttgtatctatcattcacaatttcaatcgattgctgttccaaagcatctttatactgccatttcctggtgttttaaccgtgttatcattttattaatttactaatttcagtcctaatgtttatttaacttcctctattttcttgaatattccctagtgctaaaaaaataacccacttccaaactcgaaggataaagtagctcttccccgagagatttataataagaataatattttgtttgatgctatctgataaaccaaaaacacatcaacacaacttaacattattataataaaatccataaagtcaacacaaaaataaacataaagttcagttttgtgtaaactttataatgaatttcacttaattccatgatttaactttcgtttttagaatataaaggtaaatccatgagccttttctgatataggatgtgctaatatagataatcataaaaataagatattaaaagtaaaatcaataaattatcacaatgggtggttttttcacactggacaataccatcaagtaatatatagtaatgctgttatctttatataaaggattctcatgaaaacgtctaatgcacagcgaaaaacaaatatcattaaaaatatagaatatttgatacgtacccgtggagaaaccaagagctctttttccaatcgaacaggattgacccgtaccaccatttataaaatcctggaaggacaagtcaataacgttcaacaatctactgttcttcggatttccgattttttcggtgtctcctgtgaagaaatagaatattatgaccttgaacaattagagcgcctcaatgaaacactttcaaccgaaggcaataaaaatccttcggctatccctatcgttccccaatctgaatttttagccgtttctgagaaaaaaataggtcagcttgttaccgagtatccgctgacctatttctttggtgatgaatcaaacatgttggctcttaaagtcgaatcggcaatagaagatacattcatacccggtgaggtgatcatcataaaacgtccccccgcattagtcaccaatacgccattattgtattacgctaaggaaattgggttctttatccggcaagagaaaaatgatgacagcctcgataggaaaccctacagaaatgctcattttttgggctatattgtaggagaaagactataaatgacagcaaatcaaaagtttaagttactgggattttcaaggtatggtaaattatcggcaaatgtcatggtgctagcgacaggtaagaccattactatggggttaaaagagctcgttgacagtgatatttcagaagatctgagcagacatgagctcagtacgatataccggaaactatacagccacagtaatatcgtaaccgcttatgaacttggggaccgtcatgaacgttcatggcaagcctatttactcattagcatcgcactcagtgttatctatattttctctaccatatgtggtgtgaaacccattcatatcccgatccttaatattgtcacgcctcctggggtttttatttaccctataactttcttactggtcgatattctaaacgaattctatggattacgtctggcaagaagaacgattattatctcttttgctgcgaacttattatttgttctagggctttggggaaccgcactgatgccgggtgttcctggatgggaatttggtgcgacttataatggaatagtgaatagtatcgtatctgtattactggcatcatctcttgcttattttatctctgagaatataaactcgtatctcctctgcaaaataaaatctctcacaaactcaaagtatcttttcctgcgagtaataaccagtactgttatcgcttcagcattcgacagtataatattctgttcaatcgctttctatggtgttctcggcatagacatcataaaagaaatgattatcgcccagttcctcattaaagtggcttattctatcctgggtgtaggccctatttatctggtaaggaagatattcagaaattatataaatcgaccagaagatacaccagtgaataaaaaactcgctgaagtataaatagagataacgttttgtcagaatagagaaaagtcgttgaaaagtatcatttttatgccggaatgttattccggcatattgtgctaaaataaccctttatatatctataccctatggatttcaaaatgcatcgcggcggcaagggagcaaatccccgggagcatagagaactatgtgaccggggtgagtgagtgcagccaacaaagaagcaacttgaaagatgacgggtatatcatcaacagtaaaacatagatatgaataatgtaatcattcatcatgacattgaaagaatattctaccagattaaattttcaaattaattattcagtaattttaaatctatatattcccctaaatgattaaaatattcttgcgttaaatgaggaatcgtacctaataaaggagccggtaacatccgctctaatgtcgccaaatattcttgctgacgtttgcctgcgggttcaacctcattagctatccagcctgcaaaatgtaatcctgaacctataatagcctccacggtaagtatcgcatgattaatacagcccaacttcactcccactgccaaaataaccggcagttgctctttaaccacccagtcagcaaaagtcaccgattctgataaaggggtataccaaccacccgcgccctcaactaaaacccagtctgctttcttttctaactgatgtaaccccatagacataacagtaaaatcaataggttgattcgaatcatcactggcaatatggggtgatgttgcttcaacaaatactaacggattcacttcttcatattgcaaagatacagaactatttgccagcaatgccactgcatcagcattacgaacacctgccggtgttatttcactaccagaagcaacgggtttataacctgctgttttatatcctgctttagttgccgcttgtaacaaagcgcaacttacaactgttttccccacttcggtatctgtacccgtcaaaaaccagcgcttagtcacgatgaatcactccaaaaaccacctgatagctaagaggtaactgttcgttttctcgtggataagcctgttccagagcaatcagtcgtccacgcgtcatcagtccttgctgtcgcccatcatgaaggtgagtcgcaccaatccctttcagagaacccaatagcggcaatatatgagaatattgctggcgataaacctgactaataagacaatgccggaacccttgacaggcatctttaattgtctgttgcggcaggaactgattaatatgctggtagttatcaaccacactccaagcttgcttcaattcatacaatgaacctttagctaaggtggaaaatagaattaatccaccaggacgggttacccgataaagttctcttaaagcactggataaatcatcacaccactgaacaaccagattactgaaacagatatcaacactgttgtcagcaagccctaaatgttcaatatccgcttgtaaataatagtcagccgccaattgcttacgggcatgagctaacatgcctgatgccaaatccagcccaataacctgcttcccctgttgtcgccagcggtgactaaaaaaaccggtaccgcaacctgcatccaatactaatttgccggaatgctcaccaacttgttgcatgaggaattcaccggtttgctgctgtaatttcgctaccacatcataattggcggccgctcgtccaaacgctcccgcaatcgcctgtttattggcaaattcagctacggaacccatgcaacgcctccatcaacatatcaatatcctgtggcatatggctggccgtcaaagtaatacgtaatctggcgctgcccggcggtactgttggtggacggatcgctttaacccaaatccctttttgttgcagagactgagacaaggacacactcaactcattatcactcacaatcaatggctgaattgcggtggttgaatctgtcagattgaacggcagtttctgagcttgccggcggaagtaattgatattctgctgtaatcgttggcgcaattcatcaccagattgtatctgccgaacagcttcagaaagcgcctgagcctgtgccggaggcatagaggtgctgtagatcagatgacgggcatactgaattaggtattctgctgtctgctcatcacaaagcaccgccgcaccactcaacccaaatgctttgccaaaagtgacaatcaggatttctggttttactttctgttgccagcagcttccccttccctgctcaccacaaacaccaataccgtgagcatcatccaccattaaccagttgccagaaattctggtttgctgatgaatatcggctagcggtgcgcagtcaccatccatgctgaatacaccttcggttaccaccagcgtctttccaacacaaggcgttgccagtaaatttgcaagtgattcaggttgattatgcagaaaacgccgtagctgagcgggggaatgcatcgccgcttccattaatgaagcatgactcagacgatcagcaataatccgatcctgttccgtcattaacgcggcaatgaccccctgattagcagaataccccgaaataaacagtaatgcttttggatagcccaaccagtcagccaattgttgttccaatagctgatgagcctttgtataacccgtaatatgacctgaacctccactaccaacaccatattgttcagctccccgctgccatgcggaaataattgcgggatttgcacttaacccaaggtaatcattactggaaaaattaagatatttgccatcagcggcatacaggaaacgcccatctgatttctgattgacctgccgctgacgccatagcgaagtgctccgacgctcagacaactgtcgggaaagataagatgaccagtccattataatgccgcattataaaattgttcgttatccgcattgataatggcttccgccaaatgctgctgttgctgattatcaccaaatgctgtctgagtctgctgaagattaatgcccaacttgcgaaatagttgtaaatctttatcttccgccgggttaggtgtagtgagcaacttacagccatagaaaatagaattagcgccagccataaaacacattgcctgtgtctgctcgttcatctgttcacgacctgcggataaccgaacatgagaagacggcatcatgatcctggcaacagcaatcgtgcggataaaatcgaaaggatctacatcttcgttctcagccaatggcgtacctttgactttaaccaacatgttgatgggtacactctccggcggttttggcagatttgccagttgtaccaataatgcggcccgatcacgtatcgcctcacccagaccaacaataccaccagaacacacttttattccggcctcccgtactttatccagggtatccaatctgtcctgataggtccgagttgtaatgatgttgccataaaattccggggaggtatccaggttgtggttgtagtaatctaaccctgcatccgccaaccgctgtgcttgtaagccattgagcatgcccagtgtcatgcaggtttccattcccaatgctttgacttccttaaccattttctccagataaggcatatccctctcatggggatttttccacgcggcacccatacaaaaacgtgttgaacccgcatttttagccttacgagcagaatcaatcacctgttccacttccatcaaccgctctttttcaagacctgttttgtaacgggagctttgcgggcaatatttgcaatcttccgggcaagccccggttttgatggaaagtagtgtactgacctgtacttgctgtgggtcaaagtaaatacgatgaacctgctgtgcttgaaataataattcgaaaaaaggtttatcaaacagctcttgcgcctgcttaattgtccattgcttacgctcaatcacaataacatctccaatgtgaaaaaagtctagtcagtttaaataatgccgttatactgtcaaccaattttaataaaattggtttacgtcaagccttatgaccccttccgatattgaatttgatctacgccatatttggcacccctacacctccatgaccaaccctcttccagtttaccctgtcgttggcgcttctggggtggaactggagttggctgatggccgtaagctggtggatggtatgtcttcctggtgggccgccattcatggatataaccatccggtactgaaccaagccgctaaaattcagcttgatcagatgtcccatgtcatgtttggtggaattacccatccgcccgccatcgcactttgcagacaattaatagcaatctccccgctatcactggaatgtgtctttctagcggattcaggttctgtcgcagtggaagtggcgttaaaaatggcgttgcaatactggcaagcaaaaggtgaaaaacgtcagcgtattttgacattacgccacggttaccacggtgacacattcggcgctatgtctgtctgtgatcccgacaattcaatgcataatctctacaaaggctatctgcccactcatctgtttgctgaatcgcctcagtgcggatttgattcgcaatgggatccacgggatatcatgccatttcgtactttgctggagcagcattccggtgatattgccgcagtgatccttgaacctatcgtacagggtgccggcggaatgcgaatttatcatcctgaatatctgcgtcaggtcagaatgctttgcgatcagcatcagatcctattaattgcagatgaaattgccaccggctttggccgcacaggaaaattgtttgcttgtgaacatgctgaaattgagccagatattttatgtgtagggaaagcgctgacaggcggctatatgacactatcagcaacactgacaacccgtaaggtagctgaaacaattagcaatggtgaagcaggctgttttatgcatggcccaacgtttatgggcaatccattagcttgtgccgtagcaaaagccagtttgaacttattattacaaagcccttggcaacaacgtattaaatcaattgaaaaccaattaaagagtgagttgatgccactaaaacatcatgcaaaagtggctgatgttcgggtattaggtgcaattggcgtcgtggaaatgaatcaacccgtgaatatggcggtgctacaacactattttgtttctcaaagtgtctggataagaccatttggcaagctgatttatttgatgccgccttatattattcagccagagcagctttcacgcctgacaaaggccgtttctggcgcaattaatttgtaatttttcttgtattaaataaattctgctgaatttattgctgagcagttaatagagctaagtttcattctgtacttataccctatggatttcaagatgcatcgcgacgacaagggagtgaatccccgggaacatataactatgtggctggggtgagcgagtgcaaccaacaaagaggcaactcgaaagatgacgggtatatatggcctttccttcatgtcatatctgtaggtaccaaaaccaattccatttcatctgcaagctctctaagtttttcgttaacctctttagaagtagcggcggactctgattcaagagacacatgcaaatctttttcttccacccgatctccaaaaattattattgctttaccgccgtgctgcttagagggccatcgaattgcttgagcatcaggattgtcatgataaatttttgctgcccagagctgagtaatatgataatccgatgcttctgattctactagttgaccttgaataatcccccatttcttcaatattcgtgggttgatatccacatacttgatgtctttttttggcgtaatttggctatacgctaaatcatctagtttactcagttcaacaggtataccggcgcaatttagtggaatatcatgcaaaatcgtctccataatagcgactcctacgttttcacctccatagagtgttggaacaaagattccattatttttgaacgggctaaaacgggcattaccaacaccaggattaaattcagcgcctttaaactcggctttatgaatacgttcaataggtgtacccgctttccacttttggattttggctgctgtattctctgggggaagcggtatatcttcttgaaattcttttttatcatcaaccatgacgcggcccttcagcttcttctttggctgccatataaacatcatcaggttgagttaatacaaggtcctttggttttttattaccaagccagctatttggtgtgccgaaccaaatagccattgaccaaggggtctttttgtctccaaacagcgcaatagttttctttatcactggtaacggttggccgccttcgtctagagcatacaatgggaataggtctttgccattaattggcaatgcgaatatttttttcgactttttcaaacgatttgccgcagcgctggaattcattgatttagatccggccaatttgctaagttcacttgcagtcagccactctgaatcagtaatgatctgattttttaatttttcaaggcgtgcttcattacgggaagcaaatccaatttttgaagatggttcggtcataacagaccgatgtttattcttattgaatgtagtgacagcggttactgcactagctattgccaacttaatatcatgataatcaattgcttttggcaactttattaccacatactgatctgcctcatcagcgggaatttcagacaaattgatatgtttggcaacatccttgtcatttgataactcaattgaaagaaagtcaaagctaacattctccgatttggattgcgatttagtcatcatactgcctccctactgcatctgtttgagttcgtattttgcgtattttcgttatatggatgatattgcgtatttgttaaaagtacaaggattggtgtaattgcatcacacgaggcttccatcaaagcgctttcaacgggattttgtcgtgaatatcacatgcacaacccgttcggcgcggtccgttttgcgtataacaaggcgctgcacatcaaaaagcatgcttatagaagtcacgatgtgagtttaaatccgcgcaaagacctcaaaccgctactagcggtcgcgaaaaaatcacgcaaatacgcctctgctcaaggtatgtgacgccatcacgttacagcaggcgggaaataatcactggatgagtttagtgaaaccgggcagacatagaaaaccatttttgcatctgtccggttgaataactgcaagatttggtgttgcattagctcaaacttgatctggtgcctaccggttatttgcatcaatgcctatcaaattaaaccgtaaaccagcacacacgatcaccattaacatccaacaatcttatcaaattcacagggccagcaccgttacccacattgggcctttacctactggatagcgcgtcaattcagtcaatttaccggtatatttatcaatagaagagactgaaatatggtcagacttttgaccggatgcaatcagatattttccactgtgatcgatagcaaaaccacgcggctgaatttcagttttatagtgtcctgccagcgtcaaattagaaccatcttgcgaaataacaaaatggctgatcaaacttgaagtccgttcactggtataaaggtgacgaccatccggtgtaatatgaatatccgcagaccaacgaactcccgctaaatctgccggcaatgaatcaaccgtctgaacagtccgatatttttcccacttgcgataaacatccactgtagaatccagttcattaatacaataaatcacctgctgatttggatgaaatgccatatgacgagggcccgcacccattgcggtagtgatttcctcagcacgtttttctgtcagataaccctcttttgccatctcaaaaatacggacgcgatcttctttcagacaaggaaccaatagttgtttattatcccagtcaatattagccgaatgcggtgcttgcaaaccggcaataacctgaacaggttcacccacaataccttgatcatcaattaggctgacactcaaattgttataactataggaggcagagaatagaaaacggccctgtttatcagtagagatatgagtcgggctacccggtattgatgaaatcccctgttgtgccagttcccctctagagccaatctggtaagtgacaatactgaattgtggccggatgccaacataaagatgtttacgatccgggctaaccaccattggttgtacttcccccggtacatcaactgtctgaatcagtgataactcaccttcattattcaggctccaaacatgaatctgacaactgtttggactcgccgtataaaccacttgtttcatcttcactccttaattatccatgaccattttattgtgctgtaacgactcgattggttttatcggttaaactcaccgcacaattggtgtagctttattcagtttcaatgtaatatccttacattatatatagttatgaggctaatttatgtcatatcgcatcattgcactggatctggatggtacactactcgatcctcaaaaaaatatcctacccgaatcactcattgtactaaacgaagcacgtaaagctggtattaaggtgctaattgctactggccgtcatcatgttgctatccaccctttttatcagactttgcagctcgacacgcctgccatctgctgtaatggtacttatctgtatgattaccatgaaaagagcgttttaacctcagatccactgtcaactcaagaagctataaaagttctcagccacttaaaaaacacagatattcaccgtctgatgtatgtagatgatgccatgttatatgaagaaccgtatgacacagttgtccgtaccataaaatggtctgaaaccctacctgaatctcaacgcccaactgtgcgacatgttaatagctttcaacatgctattgacgaagtacaatctatctggaaatttacaacctgttctcctgatttagtaaaactgcgggaagtgactgcacaaatcgcaaatgacacaggtctttcgtgtgaatggtcatggttcgatcaggtggatattgccaagaaaggtaacagcaaaggtatgcgtttgaaacagtgggttgaatcacagggaatgaagatgaaagatgttattgcttttggtgataactttaatgatctgagcatgctgaaagccgccggactcggtgtcgctatgggtaacagtgtggatgcgattaaagaacaagccgatttggtgacgctggataatactcagccaggtattgccgaagttattcgcaagtatgttctttaattgcttgtctgacaagattactgtgcggggaaccttccgataagctccccttttcctttgctatttatagcagagactacagttgccgatgaaaagaaacactttttatctgggcataaagccactgcccagaccgcaaattaagttcatcccttgcccacggagtgatccttgcccataaatagtggccactcaacaccaatttgacatcaacgtgtccattatcatcaaagaattcaaccacttttaccgctaaaatattacggatactactgccgcgaggaggttccagtactaatgaaacatctgacgcatctattctgatacgcaaatcagttcccggttgaacatccattttcggcaaccataaagcctggtcagcgagtgccaccgcggtcatttcataacgattatgatgttcaaccattgaaacattcagaatactgctaagcgtctctttttgtaaccaaagacgtaatgcactactggaccaaacctcttccaattttcccgttgccctgacttttccgttatccacgacgagtacattttctgccagacgaagaatctcatccagattatggctgacatataaaatcgggatgttgacctctccagaaagcttttcaagataaggcagtagttctcttttacgagggagatccagcgatgccaacggttcatccattaacaacagatccggtgccgtcaataaagcacgaccgatagcaacccgctgcttttcaccgccggacaaggtaagaggaaaacgagatagtaagtgctcaattccaagcaaactaacaatgctatcaaattctggcttcatctccggcgacatcccgtattgcagattaccctttactcgataatgcggaaaaagccgggcatcctgaaaaacatagcctatacgacgctgctctggtgacaagcagatacctttttcaatatcaaccaacacatgatcattaaggacaatccgccctttccgtgggcgtatcaaaccagcgataacatttatcagtgaagttttcccggcacctgaaaggccaaaaacagccgtgatcccctcagtgggtagctgtgtattgacctgtaaataaagatcaccaagttgttgctcaaaatccagctctaacatgttgctcccaaacgtctcctgccccaacgggttaaccattcagaaaccatcagtgacatcaacgctagaataatggcaatgatgcacaaacgagccgcagccgtttctgctccaggtgtttcaatcaaggtatacattgccagagggatcgtccgcgtttcgcctggaatattggatacaaaagtgatagttgcgccaaattcacccaatgaacgggcaaatgccaacacagtacccacaataaccccaggcaaagagagcggcaatgtgatagtaaaaaataccttaaacggattcgcgcccaaggtacgagcagcctgttccagccgccgatcaacaccttccagcgccagacgtatcgccctgaccatcaacggaaaagcaacaatagcagaagccagtgcagcaccacgccaactaaatgcaaagctgatgccaaaccagtcatataaccattcaccgataaatccacgacgtcccatactgatcagcagcaaataacccactaccacgggtggtaacaccagcggcagatggataatgctgtcaagtaatgatttaccgggaaactggaaacgagcaagaatccatgccatcaagatcccaaatggcagactaagtaacactgccataccggacactttcagactcaggatgatggcttgccattcgtattcactcaacatcgccaaaaaatctatacccgtcatctttcaagttgcctctttgttggctgcactctctcaccccggtcacatagtttgctatgctcccggggattcgttcccttgccgtcgcgatgcagcttgaaatccatagggtatattcctaacgtgggtgaaaaccataacgtttaaaaatttcaacggctttaggggttttcaaatattcataaaaatcgagaacggtgagattactatgatctttgataatcgccattgggtactcaataggtttgtggctctcttccgggaaaacccccaccactttgactttatcactggcaacggcatccgagccataaacaatgcccaatggaacttcagcacgctccaccagcgccaaaccactgcgcacattactggtacgcgccagcagaggattaaccctctcccatgcccccaaatattgcagagactctttagcgtaaatgcccacaggaacatgatctgggtcaccaacagcaagacgcccatcctctaataaggatttccatttggtttctttattaatatcaactttattgagtctactcgctttcggtgcaatcagaacgagttgatttcccaacatagtcaaccgagtttcatcaataatcagtttcttcccggcaacataatccatccactgttgatcagcggaaataaaaatatctgccggcgcaccttgctcaatctggcgagccaaaatggaagatgcagcataagaagccaccacttcaccttttttctctcgcttatacagcgccgcaatatcatcaagtgcattagtcaacgaggcagcagcgaataacgtgactttttcggtagcccacgcttgccacgtcaaagcaaaagaaacgacaacgccgactagcagtttgccaaaactctttttcatttgttttccacctgtttcttacctattagttcgtcgtgtatagcaagatatatccgtcatctttcaagttgcctctttgttggctgcactcgctcaccccggtcacatagtttgctatgctcccggggattcactcccttgccgtcgcgatccatcttgaaatccataggatatataacgtcaattggaagagtattccaatattaatcggcaaattgtaagcaatttttactgtctaatttaattcgaagtaaaatactgtaataggaaaaccaaatgaataaaatggaattgattatgattaattaagacaaattacccggttaatcaccgggtaatcagaatagcatctggtgtaaaagaaatattagttttacttttcagaacgaccaatacgggaaacgatattaaacagttccccaagaccataaattaaacctaaaattccgaccgtcactaccggtaccatgaccagggcgaaagccatacttttaatcaactcaaacatggtagcctcacacaatggctcatttaatgagcccgcaacataacacatttttaaccatagcgggtaataccgctataattagtaccattctagacaaagacagacaactgtaaccggctaaacgtgcgtttttctggttagcctataaaaatttacgattatatttactaaaaaaaactatcatgcaagccgaaattctactgacactgaaattacaacaacggttattcgccgatccacggcgaatattattactaaaacagattaaagcaacgggttctatcagtcagggagccaaacaggccggtatcagttataaaagcgcctgggacgcaattaacgaaatgaatcaactggcagacgaaatactggtagagcgtgctacaggaggtaaaggaggcggcgggacaaatcttacccattatggcgaacgtctattgcaactttacgatctactgacacaaattcagcaaaaagcctttgatatgctaaaagatgaccaacttcccctcgacagtctgttagcggccatttgccgtttttctctgcaaaccagcgcccgcaaccaattctttggcacaattactgaccgtaaccataatcaggtccagcaacatatccgcatcttgctgacagatggtcaaacatcactgaatgcggcattaacagaacaaagcgctaaccgtcttggcttggtaaaaggtaaggaggtattggcgctcattaaagcaccttgggtgaagctcactaaagagccattctctatcggtcatttcgacaatgccctgacagggcagatcagtaatattgaaaccagcgaagagaacaccgaaattatcattgttcttgatggcggtgaaatcctctgttctactctgcccaatcaagaagcaaataacctgaaactacattctggagataaaatcactgcactttttaatgctgaccaggtgattattgcaactctgtgttaagaattgactctattatcactgaacaattcggaatatccaggaatattatggtgttacgtaccttacacctcccctagtgtccaatattaaatgttaattaaaagttaatattgacattccgcgccattccgcttatttgtggaaaaatatttgcgttgcttaaaaaggaataaaagatgtctgaattgcaaataacgcaaggctgtttccgtttaagtgatacccgtaccttgcagttatcatcactaaaaatagcctccggcgaaaattgggcttttattggtgcaaatggtagcggaaaatcatcattggcccgtgcgctttcaaatgaattagtcctgctttccggcgaacgaaattgctcatttcgcaagtgcgcccgcgtctctctagaacaattacaaaaactgacggaagaagagtggcaacgtaataatagtgatatgctcagtgatgatgaagatgataccggccgcactgcggcagaaattatccagctttatcataaagataatgaactttgcctggaactggcaaaacagttcggtattatggatttactttcccgtcgttttaaatatctttctactggtgaaacccacaagacattactttgccaggcactgatgacttcacctgatttgctgattcttgatgaaccttttaatggccttgatctattttcccgtggtcaattcactgaattactggaaaaattgtcatcaaaaggaatcgttttggtacttatccttaaccggttcagtgaaatcccagattttgttgatcagattggcgtactagcagattgccagctaacctctattggcaccaaagaaaaagtgatggcagattccttggtggctcaactggcacacagtgaaaaactgaacggtattcatttacctgaaacagatgaatttcctgtcgataatcagctaccgcccgatcaaccgctgattattctacgtaatggtatcgttcagtataatgatcagccaattttgcatgggctagattggcaagtgaattcaggtgaacattggcaaattattggcccaaatggtgccggaaaatcaacgcttctgagtttgattaccggagatcatcctcaaggctacagtaataagctgatcctgtttggccgtcaacgcggtagcggcgaaaccatttgggatatcaaacgccatattggctatattagcaacagcattcatctggaatatcgtgtcagtatcagcgttcgtaatgtgattctgtccggtttcttcgattcaattggtctttatcagacagtatcagatcgccagcagcaacttgctgatgaatggctggctttactgggcttatctgctcagattgccaacggcccgtttcaccgcctttcatggggacaacaacgacttgttctgatagctcgcgcactggttaaacatccggctttattaatccttgatgaacctctccaagggcttgatccactcaaccgccagttagtattacgttttattgatgtcatgatcgctgacggtgatactcagctactgtttgtttctcatcatcaagaagatgcgccgcaatgcattactcaccgactaatatttatccctgatggtgatctatactgctacaaaacagagaaagtttctgattgatttctgatagttccccgttatgcggggatcttaatgagtctataccctatggatttcaagatgcatcgcgacggcaagggggtgaatccccgggagcatagataacgatgtgaccggggtgagcgagtgcagccaacaaagaggcaacttgaaggataacgggtatagccaattttcatcacggccatttctattagtaccttaataaggtgattaatccttgaccaaagagtctgaattaaggaacgatgattaccagcataaaaacttctccgaccagtgaaaaaaacatcgcaatttagttatcatgcattattatttttgctcactaaataacatctatcattaatttttggtctgcttttcagagccttttttaatttgttaaaaataaagggaaatatatgatttggggttacttactacatcactagcgttattagctatacaccgcactactgcactgattgttctactggccgcagttattaccggatttgtcacacaaactgtgatttatccggcagtcgccactattgcgattatttttttgttaggtgcgctacgtattcattttcaacaaaataacatcattaaaatcacaactgaactgctattactcgcctttgcggtggcattattcctacatctgctccccggttttaataacctgaaatatctcgataaagttcaggcaggccctcacagtgccccattctcaatgtatttcaactttgacaaagccctcattcctttcctgctgttatgttgcatgcctagcctatttacaacaaagccactgaccaaaattcggccttatgcatggataatcttagctattgctattcctgtattgttaagcatagcaacggctctcggagggctcgcagttgaattgcacatgccacaatggttaccgatgtttatattggccaatattttcttcatttctctggcagaagaagcgctattccgaggttatatccaacagagattgagtcagtggattaacccctattttgccctgatcatcactgctttgatttttggtggcgcacacttcgctggcggcccattactgatgatatttgctgcacttgccggattaatatatgggctggcatggatgtggagtggccgtctgtgggtttctgttgggttccatttcgtgctcaatttggttcatttgttgttctttacttatccaatcaagttggtgactgcgttataaacgtgtcaaacttgcccagtatatattcagcaatctgcaaaagatgcaaaccttaaaccaaataaagtttgaaacaagactattgattgctgttctggtgcatagggcaatataatgcgcttagttattattaagtttgatttttaaggagtttaagctatggctgtcactaaactggttctggtaagacatggcgaaagcgagtggaacagagagaaccgtttcactggctggactgacgtcgcgttatctgaaaaaggtcgcgccgaagctcaacaagcagggcaactgttgaaagaagaaggttttgtttttgattttgcctacacctccgtgctaaaacgcgctatccatacgctgtggaacattctggatcaggttgatcaacagtggttacctgttgaaaaaagctggaaactaaatgaacgtcattatggcgctctgcaaggtttggacaaagcagaaaccgcagctaaatacggtgatgatcaggttaaactgtggcgtcgtggttttgctatcaccccaccagatttaactaaagatgatgaacgtttcccaggccatgatccgcgttatgcaaatttgaagccagaagagttacccgtgactgaaagcctggcaacaacgattgaacgcgtgatcccttactgggaagaagtgatcaaaccgcgcgttgctcaaggtgagaaagtgattatcgcagcgcacggtaattctttgcgtgctttggttaaatatctggataatatgagcgaagaaaccattcttgagctgaatatcccaacagcagtacctttggtttatgaattcgacgaaaacatgaaaccaatcaaacattactatctgggtaacgctgatgaaatcgcagcaaaagccgcggcggtagcaaaccaaggtaaggcaaaataattcattgccgataaaaaattgctgacaccctattttccagcgaacataaaaaaccggagttgtcgattccggtttttttacatcggaaaaatgttatcagccacgacgcgcttttattgccgacgacaattgacgtaacaaaatttcagtgtcagcccaaccaatgcaagcatcagtaatacttttgccatataccaatggcagaccgctatccgggttctgatttccctcttccaaatgactttctaccatgacaccaataatcgctttctccccagcaataagctgccggctcacatctgaacacacatccatctgctttttaaattgcttagaactattggcatgactgaaatcaatcataattcttgccggtaaacctgctttttccaagttttgcttcacgacagcaacatgttcagaactgtaattcggctctttaccgccacgcaggataatatgacaatcgttgtttccgctggtatttacaatcgcagaatgtccccacttagtgacagaaaggaaactgtgaggggaacccgctgcattaatcgcatcaatggcaacttttatcgcaccatcagtaccatttttaaaaccaaccggacaggaaagaccagaagccaactcacgatggacctgagattccgttgtacgagcgccaattgctccccaactcatcaaatcggctaaatactgtggagaaatcatatccagatattcacccgcagccggtagccccatatcattaatatcccgtaacaactgacgagctaaacgcaaaccatcattaatatcaaaactgtgattcatatgagggtcattaattaaccctttccagccaatagttgtgcgcggtttttcaaaataaactcgcatgacaacttccagatcctctttcagctcttcacgcaattcattcaaccgcccggcatattccattgctgctttaggatcatgaatagaacatggcccaatcaccaccaacagacgctcatcttcacccgtcagaatttgatgaatcgttttacgcgccttacatactgtcaatgcagccttttcagttgctggaaatttttcaagtagtgccacaggaggtaataattcttttatctctttaattcttatatcgtcattctggtaattcataaccctctctcatctaacatctttgtatatccgtcatctttcaagttgcctctttgttggctgcactctctcaccccagtcacatagttacctatgctcccggggattcgctcccttgccgtcgcgatgcatcttgaaatctattgggtatatatttaattaaagcaatctcgtgattttaatctaactgttagaagccaaactgtaaatattctttgtagagaataaataaatcaatgctgatgaactcaagacatagcaagatgatatagtcaaatgtggttaattccattcttatagttgaaatatctttagaaatgaaaattattaaagtaaatacctaaaaatatgccagaaatcgacaaaacaattctctggcatagttagcaaactatttcacatgagataatggcaaagaatggttctccttagctgcctgaatccacaaacgggaaccattaaatgcaatgcccaagagaatcacatactgcaacgacattgccagcacgccttgatggaaatagataacaacgcttatcacattgatgaccatccataccagccagttttcgacatatttacgagtcatcaaaaccattgccacaatagatagcaccgtcattgtcgaatcccagaatgggaaggcatcaggctccaatatcggcatctgaacattaaagccaaatttttgcataatcgtaacggcaatctgagtcagatagccaaagactcgatcaatattaaaagtcataatggcgatcaatagcacagaaatcagactaattattaccgccttattcaaacttaaccaacgtattttaagttcaatctgctgctgatcattaaccctgctccaggcataccaaccataaatatttgccgcaaagaagaataattgcagcaataaactggcataaagttgaatttggaagaaaatcacagcaaataatgtgacattaattagcccaaacaaatagttaattatcttctcctgactggcaaaccaaatacataacaagccagcgatcgtccctaccgcttcaatccacgataaatcatatcctccttttcccagagggatattgactaatatgttgttaatgctgaaaaaattcatctgttatatcctattatctatacccgtcatctttcaagttgcttctttgttggctgcactcactcaccccgctcacatcgttatctctgctcccggagattcgctcccttaccgtcgcgatccatcttgaaatccattgggtatacaacaaaatattaccttcattattcaattttctattttagctgagctgcaaaatcaagcatcctatttaaaggaacaagcgccttttcccgtaactctttttcaaccaatatctcatgttgaccccctccctgctccaacccctgaacgatggcttgcaaaccattcattgccatccacggacaatgagcacaactacggcaactcgccccttctccagccgtaggtgctgcaaataactgcttctcaggacatgcttgctgcattttataaaagatgcctttatccgttgccacaatcagtttctgatgtggcaaagattgcgctgatttgattaattggctggtcgaaccaacagcatcagccagatcaataaccgcttgcggtgattcaggatgaaccaataccgcagcatcgggatgcagaccttttacccttattaaagcctgagttttaaattcatcatgaacaatacaagccccctgccaacacagaatatcggctcctgtttgtttacggacataattccccaagtggcggtcgggtgcccaaattatcttctttccctgactatccagataatcgatcagttcaacagcaatacttgaagtcacaacccaatctgctcgtgctttaacggctgctgatgtatttgcataaaccacaacggtacgatcaggatggtcatcacaaaactgggtgaactctttttcagggcaaccaagatctagcgaacactcagcttccagcgttggcattaaaacacgcttttccgggttgagaattttggcggtttctcccataaaccgcacaccggcaactaataaagtagaggccggatgattattaccaaaacgtgccatttccaatgaatcggcaacacaccctcctgtctcttcagctaaagcttggatctcagggtcggtgtaataatgtgcgaccataacggcatcctgctgttttagaaggcgtttaattttttcacggtaatgttttttttcatccttactgagaaaggcaggtttaggtgggaatggataaatggttgaattaaaatcaatatactggttcattactttgactctctgtttagtatatggttttaaaaagcgataattttggttttcagtccgaaaatttgcccagatttgtttaatatactaaacaaaatgatcaatttatagtaatttatcgcgagatattttatctatgataggatggctaaacagaaaacattattatatttataaaagctgttttattaaagctatttattaaattattttttaattaaaaaataaggaaatcccaagcatgagaatcgttttaccggcttaccctctttttaataacgaattaaaatcaataataaatgcacttttaaaaaaatagttaattgaatttaatcgaagtccattaaccattagcaatgagttaaaaagaaattagaacacaaaaaaatattatccgaataactggtatttaagcgttttctcgccgttatttcatgaacaaagacataaaagataacaaaataaaaaagcggacaaaacagttaatgtggcaagatttaatctctgaaaaaagcttgattatcctaaaaaacataaagggtagcgactgataaaaacgactcaaaactgccagtaataccgcattaataaagataaaaatcgggtatgattaatgttttttaaatataaaacacgatataccatttcgactttgaaagacaaactatctttatctcgaagccggtggttttaacattttacataaaagagtaaatatagcatctaataaggagtcagctttgtgatgtgattcaacatttttgttaacaaacaggttttctaatttgacaacaaatattaattttactataaattaagttacagttgctatattttaagttggcatttagaaactggtgaagtattaaataggttattttaggatcaagattatgcgaaaagaataatgaatctagataaagaagaatttattgtttatggtgaaaatagtaaagtaaaagaatatatcatgcatgacaatgacatattacttacaaaaatagtgaattaaaatgataaaaattactgatttatgctttagttataaaagtagagaaattaaaaaaaatatttttaaaaatatattttcattaaatgaaatcgaaatagttttatttgaaaatataaatattgaaatatttgacgatagcaagattataggattactggggaggaatggcgccggaaaaacaactttaataaagctgatttccggtattttaactccaaattctggaaatattactgtttttggtattgattcaaatggaagacctcttaatcttttatctaatcttggtatcgtttttggcaataagtcaatgctttgggatgagttatctctctatgaaaatattgagtttttttctaagatatataaacgtaattatgataagaatagtgttgaaaatatgatagaaatgttgaacctgaatagcatagcaaaaaaacctgcaaaaacgtgctctttaggtcaatctgtaaaatctaacttattaatacactttcttaataggccaaaattactgatattggatgaaccaacaatcggattagatatagagtcacaaattctattacgaaatattttaaaagattatgctcaaaataatgaaagtaaaatactaattacctcacataatatgatagatattgcggatgtttgcaaagatattatcttcttgaaggatggtgaaatatcaaaaatacatctaaataaaaataattcgaaagaaaagaatgcgctatatctagagaggcttttctgtgataattaaattttcttttattgaaaccattagggctaagaatataatatttggttacttatttataattgtaacattatatgcggttgaactatctttttgggataccatgacaaaatcaaatggttttgttaactataccctatggatttcaagaagcatcgcgacggcaagggagcgaatccccgggagcatagataactatgtgaccggggtgagtgagtgcagccaacaaagaggcaacttgaaagatgacgggtatatacgcatgatgagataatagtttatatattatggtctgttattatatttcaattgacaagtattaccggatttccagaaaatttatcgttccatattgaagatggtagtatagatagactaattataataccaaaatccatactattatattattcagaatatgctttcggacagatattagctagattatttataatgtcaccattaatttcattcataattatataccaaaaagacattcctaatattatatatctatttatttcgttatgtatagggttatttatcaatttgtacttaacaatgatattgtcatgtatggcattcaaatttanaggctcgtactcttttatcattattaaggatactttgtcatgggtcctttcaggtgcgttgataccattagatgtgtttggtgactctttaaaatcaatatttaattatattccgtttcaatatattacctatattccagttaaatttgcaacaaattcaatatctatttattttatatttaatggattcttagtcatgatgtgtttaatgatgatttttaattttatttggaattatatgttaaaatacaatcaaggatataatggtaatgcttagagttatatttattggttttaaaagtggattatcagaagcaaaaagaagcccattaaatttttggttatccgcttttgttaattttagttactatatagcacaagcttttttttggtatgctattttaaattcacaatcttcaagttatattttatctgatgattttgttattatatttttcactacggtatgtttagtcgataatttttatctttttttatttggtaaaggaagcttcttgctagttaaaaaagtcaagtcattaaagttagaacctcatttaacgttacctataaatactcaatttttatatgtcactacaaatattgtatttgagcattttttattgtcattcctatctttagtattattttttactgtacatatttaccttggtactaatattttgttggtttttttacatttgataatggcattagaaggagtcttaatacttacttcaattacatggataataagaacaacaatattttggacagcttcattagttagtattaagaactcaaatccttgttttaaagtattggtgagacctgaacaatcttttcatggtgtagttcgttttattttaatgttcatacttccgtgtctatttataactggtgttccagcttcagtagcaagtggaataatgagtatgaaatggttttttattcaaactctggtcacattgattttaatttttatagcgaaattggtttttgatattggtgtcaaaaggtattcgaaatatataacgtgaggaaacgtaatgaaattggaaattatttcagtaagctatagttcacattctaattcaagtaaagttggtaattccttagatttattttaaataaccaaaaaaataaagccggactaaccggctttattcttgctgcacgctgcttccgccactaaaattatgccgccctgacaatgtagttaaatgcgacattgcgtggtcgaaatcgtaagaaattaaccccagtggttgttggtgatgttacgttgtattttaaatatcctgccgcactacttgcaataccgtcgtagtttactatctgttgccctccccctcttgggaaatgaccaaggtattccgccaatgaagtgctttcttgccaagtcaatagcgccctccccagatcaaccccacgcccatcatcccatccccggataaactcacctcttaaatcaggtaatctaccactaggataagcttcagctaattgcgggtactgtaatgaattaaaagctgaaccattacaaataaaataaccggtagggggattaggcaacggccacggtataggtgaacccacaggtatagtaatatctgcacgtaatgcatttattacttcctgaacaagcttttgtgtcactgccaatgtgtcgctattacccatcacatttgtcaactggacaacacctttttgtgttaacgaagcactgggaatatctgttgtaattttttgttctaacgctttattcaattgatctgtgagtttagctatatttccatcatccagaacatcattgccagattgtgccgcaataaaatcagccaccacagatgataccgttgatacttgacgtaataccttatttaacacgtgcgtaggaacattatctgggggaaagccagtctgcaaaccctggttttcttcatatttttcttgactgaccacattcgcattatcactaatagaaaaagccttaaaatcatttttaggactcatacatacctcttgaatcaaataatattctttcataagaaacatattaaactattgtaaaaacgatttatcgtaatttacataaataacagtctagttcagaaaaatcacaatggagcgttcttattacttatgaggttaatcatttttatataattggcagcaataaatatctcaacattttttaatcgaaaatatatcccctcaaaatttatatttaatctctgaaattattttttacattccttcctgtaacttcttctgttttaaattcaaaatagaatcttctggcatttagacacgaatatctaagcgacagtgttctggaatgtcacacaactttctctattttaagaataaaaaaataaagccggactaaccgactttattcttactgcaagctgctccagccactagaattatgccgcctttacgatgtagttaaatgccacgttacggggtctattttcgttagcggttgggacttgtcttgatgcatcaatgtcaaaatatgtaagatcagtactaccgccgctatttgctgaacgtgtatctgccgtagcatatcgcgacgatgccataaccccactcacaacaggcgtctggggagcaccgcccatctgagcatgtatcatttgagttgtccctgtaatatttctaattgcatctccctgccaagacaaaagcccacgaccactatcaacaccacgattatcatcccatccgcggataaattctcctcttaaatcaggtaatctaccgctaggataagcctccgccaacttcggatactgtgatttattaaaaggtgagccattacaaataaaataaccgaaaggtggatagagtaacggccagggaataggagaaccaacaggaatttcaccgactgttttaatccggttatctatctcttcgcgggtataagtatgctcacgtaatgagtttatttcttgctgaacaagcttttgcgtcactgccaatgtatcactattgccaatcacatttgtaagctgaacaacacctttttgtgttaatgaagcattgggcatatctgttgtaattttttgtgctatcgctttatttaattgagcggtgagtttagctacatttccatcatccagaatatcattgccagattgtgtcgcgataaaatcagcgacgacagatgatatagttgatgactgacgtaataccttatttaacaaatgagtgggaacattatccggagaaaatcccacctgcaaacccaagttttgttcatattttgcttgactaatgacatttgcattactactaatagaaaaagccttaaaatcattcttgtgactcatatattttccttaaattaaataatgttatttaataatcaacatcttgaattattgtaaaaataatcccctgtaattcaggctaatcaaagtctagttcaagaaaaaaataacactgtgttcttattacttataagcttaaccgtttttgtatcattggcagcaataagtagttcaatattttggagtcgctttcggctttgcaagaaatggaaattaagaaaatatctcgatggtgtgtcgatatgtacatttgttgcgagtacatattgaaaccccatcgatgctattatgaaattttaccgcaaaaatatggcacattaccctttttctgttttcagaataaaaaaataaagccggttacccggctttatttccttatctattccgttgcttgatagaataggtttatggaatgactataacactaggatctgttaacgaacattcgatgtttgatactagggtgacagcaataatatttactgtcgagtttcttgatttatcaaacaaagaaacctttatcacctcagtagagagtttttccccttccactccatcatttaacgtaattatcctaccattgtgtttcagaggaaattcatttaacagaatgctagcactctttgaaatatcaacattatcagacttaataatacctttttgttcagctttctgtattacttgctgaacattccaaccgttaatatctgcacaatcatcagatcttgttcccgccacagcgttagcagtaaaaagcatcgcagttaatatcaatattagtcttttcattcgacaaccaaatccatatcgtgcgagagcaatatctcacgtcgtatatctctattaagaattatacaaccttctgatgaatgttcaggatcttttctgctagcaccgtgaattctaaaagcactacggccatgcatatcattataactacatgggtcaaggataatagtcatggggccttttgagctattttcaccggttattttataataacctctgggtataggacctaagttttttataccttctgatgcaggattattcttatgtataccctgaccactccaaccgtggccaattagcttcgtatcgtgataaatttcaccactgtattgttgataaatccacgtcatagtgcatgcctctacttgaattattaatactaagtttcatttctacaaattaaataaaacccatatagctcatcaattagacaataacatatctgaatagttctcatacattactaaaataactggatttattctccatattttcctgtaactttttttgcttccagttccaaactgaatcttctgacatatggacacgaatatctggtattaaagattttcacttccgtgttctacggcatatgtaggcacgctggttgatataatccaaaatcgctttcggcattaggcattaggcattaggcattacacaagaatacggcacattaccctttttctgttttcagaaaaaaaataaagccagactaaccggctttattcttacttcaatctgctccggccactagaattatgctgcccttacaacgtagttaaatgcaatgttacgagggcgagtttcatttgcagtacgtgcgacacgtgatgaatcgaaactaactgcgtacgatgttccattttgtgtcacatgagatattgttctcaagtcaccctctagaaaaactccggatgtggaatcatgtggacgcgtcatcaaaccaatgccgttaccagcttctaaaaaacctgtcattcgctgcatcgcatccccctgccacgacagcattgtgcgtcccatgtccacaccgcgtccatcatcccaaccacgaataaattcgccccttaaatcaggtagcctaccgtcaggataagcttctgctaactttgggtactgtaatttattaaaagctgagccgttgcaagtgagataaccaacaggtggatagggcaacggccagggaataggagaaccaacaggaatttcaccgactgttttaatccggttatctatctcttcgcgggtataagtatgctcacgtaatgagtttatttcttgctgaacaagcttttgcgtcactgccaatgtatcactattgccaatcacatttgtaagctgaacaacacctttttgtgttaatgaagcattgggcatatctgttgtaattttttgtgctatcgctttatttaattgagcggtgagtttagctacatttccatcatccagaatatcattgccagattgtgtcgcgataaaatcagcgacgacagatgatatggttgatgactgacgtaataccttatttaacaagtgagtggtaacattacccgatggaaatccagtctgcaaactttggttttcttcatatttttcttgactaaccacatttgcattatcactaatagaaaaagctttaaaatcattcttatgactcatgtactttctccttaaattaaataatattattttataatcaatatattgaattattttaaaaataactctcctgcaattcactccaattaaagtctagttcagaaaaataatatagttcaatattttggaatcgaaaatataccttaaaaatttacatttaacatctggaaattatttttctcttattctttctatttcatcccgtaactttttctgttttaaatttcaaactgaatcttctggcatttagacaaaaacatctaagcggtaatgctcaggaatatcataggattccctatctttgtagaaaacacgcgcattgttattatcgatacccttaagttgccagttctgaaaacgtgtcgataaatgcaagtgctgagataccatcatacacacctcatcccatacctactctatagcttgtgatattacagttgatatatttcacccataaaacaactacagttaagcgatataatacttgccacagtcccatgacgggattaaggtgactgtgatgaaaataatatccattgcatcatcgaaaacgttctgagaaaaacacccagatgcaaaacaaccactaaaggcttagtttgacgaggcaaaaaatgcctcatggaaccgactacttatcaaaaaatccacacaattttgttttatatactaaacaaagtaaccaatttataacaatttgtcgcggagtattttacctgttataagttattacattacctgctaatttatgagattaggctcactcatcaatcattactaaagttaaataggaacttcatataatggaagacccggtaatccttctggaaaaaatcctgacttttgcccataacgatccccgtattgatacagttatccaaacaggttcccgtgccagaaatgcacgtgtagataaattctcagatctagatatagaactgattggttcaggaacagatgaattaataggcaacgatttatggtttaagcagttgggtgacgttatggttgcattgcatctggctaatgaaaaagaggatgaaccagattggccaacttgtctggtcgtttttaacggcggtcgtaaagtggatttcacactggcaagtgttaaacgcctgaaagatatgaaacaaagaggcttggatgaactttatcaacgcggctataaggtcctccttgataagacgggccttacaaacggacttcctgaaattactcaccaattgactaaatcgtatattccatcatcaacagagtttaatgaaaacctgcgcgagttctggttcgaggcaacacaagtacctgtttatatcactcgtggtgatttatggcatgcaagaatgagggataatgagatgaaagacttattgctggcaatgatggagtggtacgtctcgataaaaagtgatggaaagacggatgtctggtacaacggccatcatttgcatgaatggctgcctgagaagttcagcaaacatattcaagggatttttagcagttatggcaaagaagaagcgatacgagcattgctggaaaccacagagctttattcggagatttctgctgaagtggcagaaatgaaggggtttgagttcgatagtgagctacccagtaaagtcaggaagcatattatgcaagtttgttatggttaaataatctcgaacaccacaaaaaacctgtaagtgtaatcaaaagtcaaacgaaacagttcaatgaggaaactagaaaaaaatgaaaatgcaaaaggactcttctcatacagttacgatcaaggaagtaattattcagcagaacgatgaagagaatatggaacaaagcgacccggtaccactcgtcgaaatgtcagtcagtctcgcttcgctcggctcgaacctgcgaccaattgattaaaagtcaactgcgctaccgactgagctaacgatccatctgggaaattggttttgaatgaagctctaagatggtgggtcgtgcaggatgactcggcctacggcctcgcccttcgggccagcgcttacgcgctgttgtctcgcttcgctcggctcgaacctgcgaccaattgattaaaagtcaactgcgctaccgactgagctaacgacccatctgggaaattggttttgaatgaaactctaagatggtgggtcgtgcaggatgactcggcctacggcctcgcccttcgggccagcgcttacgcgctgttgtctcgcttcgctcggctcgaacctgcgaccaattgattaaaagtcaactgcgctaccgactgagctaacgacccatctgggaaattggttttgaatgaaactctaagatggtgggtcgtgcaggatgactcggcctacggcctcgcccttcgggccagcgcttacgcgctgttgtctcgcttcgctcggctcgaacctgcgaccaattgattaaaagtcaactgcgctaccgactgagctaacgacccatctgggaaattggttttgaatgaaactctaagatggtgggtcgtgcaggatgactcggcctacggcctcgcccttcgggccagcgcttacgcgctgttgtctcgcttcgctcggctcgaacctgcgaccaattgattaaaagtcaactactctaccgactgagctaacgacctatctgggaaattggttttgaatgaagctctaagatggtgggtcgtgcaggatgactcggcctacggcctcgcccttcgggccagcgcttacgcgctgttgtctcgcttcgctcggctcgaacctgcgaccaattgattaaaagtcaactgctctaccgactgagctaacgacctatctgggaaattggttttgaatgaagctctaagatggtgggtcgtgcaggatgactcggcctacggcctcgcccttcgggccagcgcttacgcgctgttgtctcgcttcgctcggctcgaacctgcgaccaattgattaaaagtcaactgcgctaccgactgagctaacgacccatctgggaaattggttttgaatgaaactctaagatggtgggtcgtgcaggattcgaacctgcgaccaattgattaaaagtcaactgctctaccgactgagctaacgacccatctgggaaattggttttgaatgaagctttaagatggtgggtcgtgcaggattcgaacctgcgaccaattgattaaaagtcaactgctctaccgactgagctaacgacccatcttgtgacttctctcggcaacggcggcatatattactgatttttctgcactacgcaataattattttttcaaattacgtttaaatgcttactaagcactcaacaaaccccgaaaatgtattattacacccttccggggccaataattacagcgtagaaagctttttctctgccagtttagctgcgttcgaaccaggatattgtttcatgacctgttgataaaccgatctcgctttatctttctggcccttgtcttgcatgattaaaccaactttataaagcgattcaccactcttctgcgacttagggtactcttttactaccgtagcaaagtaatacgcagcttcgtcttttttacccttgttgtaattaagctgtcctaaccaataattagcattaggcatgtaactcgattttgggtaactcttcacgaaactctgaaaggctataatcgctttatcatattctttggtattcactgccaaatgaacagcagcgtcataatcacccttctcgctgcctgtactgacagatgatgatgcctgattgccactgttttttgtattacttgccgttgaagaagctgtatttgcagcaggtttactcccctcagaactagtagcaccttccagttgctgataaatatccttctgccgctctataatctgattgagctgatactgattctcctgaatctgccctcgaagcatgtcaatatcacgttgagaatcagcaagttgctgctggagctgagttaatagctgactgtgagcattggaaatacgctctaattgggtaaggcgttcatcggtagaacccgagccgacattactgattggcgcttgggcaatagcggcccagggaaccgttacgccaaccaataacgacagacccaaaaaatgatgtctgaagttactgttcatgaactactcttagtatgccagtactgcgcgacggtttttagcataggcggcttcgtcgtgacccagtacagcgggtttctctttaccgtaagagacgatagagatttgctcaccggaaacacctttgccttgcaggtacattttcactgcattagcacggcgttcacctaatgcgatgttgtactcaggagtaccacgttcgtcagcatgaccttctacaacaactttataagatgggttgctgcgcaggaatgccgcgtgagcgtctagcagctgagtaaaatctgagttgatgtcgtatttgtcaaaaccgaaatatacgatgttgttgttttgtagctcttgcatttgctgacgagctaattcctctgctgacagacccgcattagtttcattaacagtgcccacaccagtctgatcgttatcagcattcttgttagaactacacgctgctacggccataactggtaaagctaacatcagcccttttagcactttgttcagttgcatctctttgatccttttaaaatttgccatacatattattatgcatcacagatacggcgaccaggcaggaaattttacctgtccatcggttgccggaagacgcgctttgaaacgcccgtcagtcgaaactagctgcaatacagtccccaacccttgggtggagctataaatcaccatagtgccgttaggtgcgatactcggcgtttcatccaggaacgtatccgtcaaaatttgaacggctcccgttgccagatcttgtttagctatgtgctgcttaccactctctgagctgaccatcatcacaaaattaccatcagcacttacatcagcatcctggttttgtgtgccttcccaagtgaggcgttgcggagcaccgccatttatatcggttttgtataactgtggacgaccaccctgatcagaggtataaaccaaagtctggttatccggcatccaactcggctcagtattgttactgcggccatctgtaatctgacggatctgagctgaacccaaatccatcacgtaaagattcaaactacccgatttagacaacgcaaatgccaatttactgccatcaggggaaaatgcaggtgcaccgttatgacgtgggaaggaagcaacctggcgtacttcaccactcgccaaggtttgaataaccaaggcagaacgaccactttcaaatgtcacataagccagtttggcaccatcaggagaccaagccggtgacatcaacggttccggcgaacggtgaacagtgaactggttgtaaccatcgtaatcagatacacgcagttcatacggatatttaccgccattagtctttacaatgtaagccagacgagtacggaatgcgcctttgatgcccgtcagtttttcaaatacttgatcactggctgtatgtgcagcataacgtaaccactgtttggtcactttaaattgatcctgagcaagcaccgtacccggagcactcgcagtatcaaccaattgataagagattaaaaaaccaccatccgcacttggttggatctgaccaacaacaacagcgtcaatccccaacgccgaccatgcagcaggtgtcacctcagatgtcgtcgttggttgctgtggcatgcggctgatatcaatagggttaaatttaccgctgttgcgaagatcggccccaacgatcgcccctatctcttccggtgcattacccgcaccagtccatttaaagggcacaacgccaataggacgtgcagaatcaacaccttgggtgatctcaattcgaacttctgcgtgagcaaccgtgacccacaacattaaaatgcttagtactactttaaaagcctgcctcattaatctctcccttatcacgatggaatggtcgcaataattcgcagaatattaacaaacgtcaacaaacaaaaccagatatacccgttatctttcaagttgcccctttattagctgcactcactcaccccggtcacatagtttgctattctcctggggattctctcccttgccgtcgcgatgcattttgaaatccatagggtataaataaccactttattgagggttgaaatcaagcggcgcgtttttaaacacttcataaacctccttgcttggtggtttcggaattttcgcttgtttagccgccgctaccgccgcttggcacaacgcctggtctcctccctctgacttgacatcaattaataagccatcaggagcaagtttaatccgtaatgtacaggtacgcccacgatacatgcttggatcgtaaaacttattctgtatcgctatctggatctgccccagatagttattaatgtcggcatttgaagcgccacttttcttgccgccacctttaccggcagcagaagctcctccttgctgtttcggtgcattggaagttaagccacccagtaagtcatcaacttcactttcctgtttagcggcttgcgcagcagcttttttcttagcgtcagcttcggccttggctttagcctttgcatctgcctcagttttggctttagcatccgcttcagccttggcttttgctttagcctcagcgtctgctttggctttcgcttcttccgcggctttttgtttagcagccacggcttcagcttctttcttagcttccgcttcggctttcttctgtgcctcagcctgctctctaatcagtttttctttttcagctttagcttttgccgccgcttcttctgcctgtttttgctcttcacgggctttgtttgccgcttctacagcttgctttttctgttcttccgcagcctgttgcgctttaattcgttcttcttctaccgcttttaaacgttcctgctcttcagcctgtttttcccttaattcagcggcctgctgttcggctttcttgtttcgtaactgctctgcacgcttagcatcagcctgctgttgttgctgttgattgtactgctgtactaccgcattcggatcgaccataacagcatcaataacagaaccatcctgaccaccgccacccatttcagtttttcgtgtcagggaaccccaaataagtaacccgatcaaaataatatgcaacacaaccgaaacgataacagcgcgatttaatttattgttttgcccgtttgtctttcccacgctcgatatccaagatcttcaaataacagcaactgtcggccaaactcagataggctgagtcattaaaccaacggatttcacacctgcctgatgcagcatattgagtgccttaataatctcatcgtaaggcacttccttcgaaccaccaatcaagaaaacggtttttggattcttttctatttgtgcccgcgcttcaacaataatctgcggctcaggcaataattccaaccgttcatggttaactatcatggtgtactgaccaacaccagaaacctccacgattaccggtggattatcggagttggaaaccgttttagaatctaccgcatccggcagatcaacttctacgctttgagtgataatcggtgctgttgccataaaaatcagcaacagaaccagcaatacgtccagtaagggaacgatattgatttcggatttcagctcacgcttgcgactacgagtgcgtgccatagcctctccccttactatttgttctctgctttattttcagccgcgaaagcttgacgatgcaaaatagccaaaaactcttccataaagttatcgtaattttgctccagcttattaacacgctgattcagacggttgtatgccataacggctggaatcgccgcaaacagaccaatcgccgttgcaatcaacgcttctgcaatacccggcgctaccatttggagcgtggcctgttttaccgcacctaacgcgataaatgcatgcatgatcccccaaaccgtaccaaatagaccgatatacgggctaattgagccaactgtccccaagaatggaatatggctttccagcgattccaattcacgattcattgagatacgcattgcacgtgaagcccctgttattaccgcttctggcgcatgattatttgcatgatgcagacgggcaaattctttgaacccagaataaaaaatttgttctgttccacctaaagaatctcgacgcgactgactttccttatataagcgtgataattcaatacccgaccagaatttatcttcaaacgcctccgattctcgggttgctgcattgagaattttggtcctttgaataatgatcgcccatgaagcaacggaaaagcagatcaaaataagcatgatcagttgcaccaaaaggcccgctttcaggaataaatctagaatgttcatgtcagtcactgcttaaactccgcgacaatagactttggaagcgcaatcggcttcatttgagatgtattcacgcaggcgactaaaacttctgcgctgttaatcattgctccattaccatcaacaatgcgttgaataaatgtcaaagatgctcgacgaatatccgtaatttcactctgcacctccaacatatcatcaagccgggccggggctcggtaatcaaccaccatacgccgtacaacaaatgcaatttgttcatcaagtaaacgctgttgatgaattccatgctgacgtaacatctcagtacgtgctctttcataaaagacgacataacggccgttataaactatcccgcctacatctgtatcttcataataaatacgaatgggccaccggaacaacgtattactcactttcaatcctacataaggcgaattaacgttgccactatactcaagacaatgcggctttggaataatgtgcaaataaaaaatttatgggttagatgccccaataacatacagaattaacttataaagaaatgacacagcccccaaatcaaaatcaagcatgccggcaagggagagaaaaagatacgccagacgatatttcttggctgaaaacccatcccgaaagtcacacctgtacatacagaccatattagaaaatactttgccatatctgtaatgaactggtgttagccgcaaaacgagcagggtcccagaatacataagcaacgaatattaatgccacaataaggataaagcccgcacaggggctttatccattagtatctagtatccatgccgatagtatttatctatcaacaagatttctcgctatttttcgcgactttttcttcttcattatgctcaagagctaaggctgcgatgatagcgaaactacaagccaagagcgttccgagaatccaagcaaaataccacatgctttatgttccttagtacagtgaatgtttgttatcttcgataaaacttttatccaaacgcccgaacattttgtagtaacaccaaatggtatatcccagaatgattgggacaaaaatcaatgcaactacaaacataacacgcagcgtcatcaggcttgaagtcgcatcccacatcgtcaaactgacattaggatcagtgattgaaggcatcacaaatgggaacatcgttacaccgcaggccagaatgatgccagcaattgtcagtgaagagaacaggaatgcccatccagctttattcatacgcgtcatcagcatcgtcagcaaaggcgaagccacacccaatgccggtagtacccacaaccacggatagttgttaaagttggtcaaccaagcacccgcctgatgagcgacttctttatgtaatggattagactgagccaccgtatccaagccgccagtcacaatataaccatcaataccataaatcagccatacacctgccaacaggaaagccaccattgtcaccagcgcacagagataagttgccgcacgagaacgcaggcgcagctcacccgtagtacgcatttgcaaataagttgccccctgagtcacaatcatcatcaagctgataattcccgccaacaaaccatatggattgagcaatccgaagaaggaaccggtatagaacagacggagttgggaatcgacgttaaacggcaccccctgtaatagattaccgaatgccacaccgataactaatggtggaacaaagctaccgacaaatattccccaatcccacatgttacgccacttgcggttttccaatttggagcggtaatcaaaaccaaccggacggaagaacaacgcagataacaccaagatcatagcaacatagaagccagagaacgccgcagcatagaccatcggccatgcggcgaacagcgctccaccggcggtaatcagccaaacctgattaccatcccaatgcggtgccactgagttaatcatgatgcgacgctcagtatcgtttttgccgatgatacgtaacaggataccgactcccatatcaaaaccatcagttaccgcgaaaccgattagcaatacaccaatcagtagccaccatataaatcgtagtacttcataatcaaacataagtggactcctgtttactgagcttcaggtgctgaagttgttttctgttcaaaatggtaacgccccgtttttaggctacttgggccaaggcgagcaaatttgaacatcagaaacatttccgcaatcaggaataaggtataaaggccacaaatcagcgccatagagaacaagatatcgctggctgctaaattggaactcgccaccgcagttggcagaacttcaccaattgcccacggttgacgaccatattccgccacaaaccagcctgattcgatggcaatccacggcaatggaatactgtacagtgctgcgcgtagcaaccatttttgtttaccaatgcggccacggataacgctccaaaacgccagaccgatcaacagtaacatcaggaaacctgctgcaaccatgatacggaatgcaaaatagagcggtgcaacccgaggaatagaatcttttgcggctgctttgatctgttcttcactggcatcagtcactttgctggtatagcgtttcagcaacatgccataacccagatcttgtttattttcattgaatgctgtacgaaccgttgggtcggtgttacctgcacgcaattcttccaacaggtgataagcctttataccattacgaatccgctgctcatgcaggtccatcaaatcacgcagaccaatgaccggagtatcaacagaacgggtagcaatcagccccataagataagggatctgaatggcatatttgttttccattttatcctgatctgggatacctatcagtgtaaaagcggccggcggtggctgggtttcccattcagcttcgatggcggccagcttagttttttgtacgtcgcccatttcgtaaccagattcatcacccagcacaataacagacagcacagccgcgataccaaaacttgaagcaatcgcaaatgaacgcttagcaaatggaatatcacggcctttaagcaggtagtaagagctgacaccgagaacaaagatcgctcctgtcacataacccgcggcaacggtatgcacaaatttcacctgagcaactgggttcagtaccagttcagcaaaacttaccatctccatacgcatggtttcaaagttgaaatcagaagcaattgggttttgcatccaaccgttagcaaccagaatccaaagtgcggagaagttagatcctaatgcaaccaaccaagttaccgccagatgttgtgtcttactgaggcgatcccaaccgaagaagaacaagcctacgaatgtagactccaggaagaacgccatcagcccttcaatcgccaaaggtgcgccaaaaatgtcaccgacgtagtgagaaaagtatgaccagttagtcccaaactggaactccatagtcaaccctgttgcaacccccagagcaaagttaataccaaacaacttgccccagaattttgtcatatctttataaatttgtttaccggagagcacatataccgtttccatgatcgccagcaaaaacgccatgccgagcgttagcggaacgaatagaaagtgatacattgcagttaaggcaaactgtaatcgtgacagttcgacaatatcaaacatcttgactccttgctcctagcaggaagacaccgacttgcggcaacctgacttcatataagcccttttctcaaatctcaaagtactcatgcggaagcctcgtaactaccagcaataaatgcctttaaaatataccgttatctttcaagttgcctctttgttggctgcactcactcaccccagtcacatagttacctatgctcccggggattcgctcccttgccgtcgcgatgcatcttgaaatctattgggtataacaactcattactaagtaaattaaaaaccaattagactaatagtatagtacgcttatattcccatacaataaataggttttacgtgattcagattagaattctgaatataggtcaagaattgcaaccgctgtttaataagaactaatttgattagagtcaatttaagcaaatgaaagcaataatactatagtaataatttgattttatttatctttttctggttagtgttaattatcttgtctattatttcattttggttgacatattgttaattatttgtttatttagataaatattgatttctatattgctgtgaaatgacttttaaaattaactttttattttgatccttaagaaaatattattattaactttgcattaacagtgagatcaccaccatttggctgtcattcagatagcataatgacacgcagctcaagaactaaacttccctcttacgacagatctcttcaaactgagtgaaatgacttagtatcttaagttacacagcccaacaataattgtgtaaaaatattttacacaacagaaaaactgcgcgtaccagcaagtaatgaccaatatcgcattattacattcacatggtactacaaagcagaaacattctgatatttttaaagatatcgagcttatgaaanagctaaaagttgagatcagaaaactggttgaattagaaaactcgcctacagagccagcaaattattttggccttcccagaatagcattctccaaagattctaaattagtttcagctcaagtttttagttccatatattttcctcctcttactactttaagcaacgataccattaaaactgagactaaacagacatcgatcctctccatttttagcacagacaaaaatgggagatcaaaaaaacactcatacgcacaaatggaaatgcaagagacacagaaatacgagatttttcaataagcactggggaatataatcttgctgacttgaagaaacttggatttattcaatctgttgctgctttccaagggaaaaaaacgggaaacctctcactactggcccagtattagttaagtcaaatacactgacaaaccttgaaaatccttttcaatattttcagcctcacacaatgaagaaccatgcaccaactcatgtaaagaacccaaaaacgcaatcggtaatcgtttgcttgaatagagcaaatcctgaaccaagaactcctagtcaatgcgattatggtccaacatcacccggtaatccaacaatcaagttagaaataataggtgatattatattcaataaccctatagcggttgatgaaaaaggaaaacctacaacgtttcagggaatcaaaccagaggcaaatctgacactaattggtcttaatactggaggagcatgtgaagtaagaggaatagatgaaggtatattttggaaacatacaaaagtcaataatgatcctgccaaaggtaataatacaaatttatcatgggatttttctaaaaatacaggttacgctgatttttgaccaatatactggaaaaataacgaaagctatttactagacttacaggctactgttataacaatgcaagatgataacgcatttccggttatattttcttataccaataaccctttcgtattaccacgatggagatcactgccttgaaaaacgccgttattgggtgatctccatggacgaaaatacgcagtcgtcgttcaagcgctatgctagcagttctttaacgaatttaaatgatttatgaaaatcggctttaggatctttaatttcacccgacccatcctgattgagctctaaagaccagtgatatgggtaacgctgtttcaattgctgtagttcgtcataagttaataccgtatagccgtgttgtttcatgtaagaagcaaacacctcaagttttggttcggctatagtagtaataactgctcggtcgcaaagatatttagcatagtgctgaccaatttctttattttctgtctcagctgcttgtaaagccgcctctacaacgtgaagcggtgcctgctgcgacacaattgcactacaagtttcagataagtcattaatagtaggattattcataatgcttttacctttcctttttaattttcaatggcttgtgctatttgttttgcgacctgatgtgctctaggatcggactgagtacgcaagccttctataattgctaagcggtcatcaatgttacgttgctgcatcaactgcctttttcccagcagattgtgaatagtcagctcgatcccaacgacatgctgttttaagccgtctataaaatctttcggtgcttctgcgacttgccaaggatccggtaatcctgcttcaaaacaattaacggattgctcaaaatgcgcctttatccaactgccatcatcaataaacttgatggaacacatggcatgaactgccgtgtaagcccaactaggttgaactcgaccattgatatgtcgtctaggtaaccaactaggtgaaatataagcgtctggtccttggaaaataaccatcacttcattagtttcaaccacgcttttgtgcaaaggatttccgcgtgcaatgtgtgttttcagcacgcctagctctaaaccatgcctatctaaagtaaaaggcagatgatcagcactcaatccataactgccatagacggtcaaagtccccagagggttttgctctatcaagtcatgcaaaacagagattcgattttcttcaaatactttttgtatatacattgcttgaatcttatgagttcaaagaagacaaaggctcactataaccttgttcttcaagctcccgttgtgcacgatcgtttttcttcaagtctgctaatcccataccattgagaacaccaggagacttagtaaatttaatattctcgtagctgaccacttcgatatgattgccccaaggatccagaaaaccaaaaaatcggccaggcaaaggttcaatatcgaattgctttaatgcctcacgaaccttttctttatcatcaacaacgaacccaaaatgaccaggtttgtgagcttgttctccttggctgcaagtaaaggcaacaaactgatcacccagttcaatcgatccctcagtctctgataacagcccgggtttaatgcgcataagcgcactataaaatgcgactgcttcattaatgttaccaacttcaatagacacatggttgatccctacggctctggccttctctgtcatgattccctcttcatcaaatttttttgaagttcaatttgtctacaacgatatcaagtgccgaaataaatttttcgcaatgttcaagctgtgaaatggttactctcagccaaccttttaaattactctgttcaaacggacgtctgattaaaataccctgctcttgaaacaattgctctatctcttttgaatcgtatccggcaaactgtaccaacatgaaattaccgtgagtatctttgaaagtctgtcttctttcggtcaaagcttctctcatataggcttttgtctgcctcatcttctcctgaaaacgttcaagcacttcaggatgatctagctgccattccgcagcccatgccgataacgcactaatctcatatagcggtctgacatttgaaatatggccgattaactctgtccctccgatcaaaaagccgactcttgctcctgccaatccatgagctttagaaagggtttgtgccaaaataacgttcggaaatttctgcaagatatccaggtttgcgctttgttttccttctacatatagataggcttcatcaatcagcagcaacacacccttgctataaagcgcttcagccaagccatgcatttgggaataagataaacgcgtgccgacaaaaccactcggatcttctacaatcactaatttggtattttctttgactgcatcgataatagccgctacatcaggtttccaatcttcggtgaccggtgttgacgagattgataccccagcatactttgcgtagttttcaaacataaagtagcaagggttatgtaaaaccacatgatctccctctcttaagcatgcatcaaataatgcttttatcgctaggtctgaacccgagccgaggtagatgttgcgctcttcaacgccaaccagtttggctatttttttatataagttatttagcaccggataattacacaaatgctctggttttaatgaggctcgaaacgcttcaaaaagatcttcatccattggatggtgattctcatttttatctagcatcaagtaattggggcgttcttccagatagctccataagctttcccttttattttcaactacatgctctttgattactgcttgtatattgaacatttattttttccctaacttttaagagttagccatttgtccatctaagatgaggatttgctttcaatggctagtgattgttttatgatgattgcaacaaataaaatctggccaatagtaattacagctgcggttgcaattgcgtattggaaacctaattcatgtgcgtaagagaccaccatggcgacaatcccgatatgcactgaggatacgatatacttaatactacttagcctacctatcatgtgagatggcagctgtttatgtagcagtgtgcgccagtaaatacctgagtaactttgaaacaagccgatactcacaatcgcgagcggcatcaaatagaccgcctgttctgtgaaacataaacctagatagattagaaaagcgacctgaatagcgataacatcgcttagagaagtacttttgttccttatttgcttcgcaataacagcgccaccaacaaacgctccaatagcgaatgaggcatctaatccggcaagccagtatgtgctgccgtcaaatgcctgactgacgacggaaaccagcataatgttgaatatggctacagtaacgaaatcaaaattacttagaacaaaatagcgcatgtagggtttactagctttaaacaactgccacaggttttctggatcttcacgtttatctatatctgaaggagactcagctaacgacaaattggctgttgctcgccagtaaaaaaagctcgcggcactatatagacagacgacaaacatcaaaattgctataaagtcaaactcatctagcaaccaggcagataaggccataccaatcaactgaccgccctgaaatgcggaagtcagtgtaccgttatctttttctaagcgatcatgttgagaaagaagtggtgtaacactgaataaggccatttttgaaattggcccaagaaaactcaaaaacaccgatattagcaataaaatcgacacggacatgcccaattgagtcaatgccaatacacctgccaaacaaaagacaacatgacaaacggctgaaccaataagcaccgttttaataccttggttatcaaccgacttgccaaccaatattggtaaaatggttgagatcaagatttcagctatgaagattaagctaatttgccatatttgacccgtttcatcatacataaatttggcaaagctcagtagcaatatagctttacctatattgatgaacaactctgcaattgctaacgacttcattcatgtttcccttcagttagatacagtactaagtacttggatgaacttatggttacactactcacctacaacaaattcaagtttctgaatggcttcctctgcaatacttagcgcctgttcagaactgtcgcacaacaccaacaccgaggctgagcggtcgaagctgtttactatttggggcagcacttcacctgcctgatgagtgatagatacatcttcaacaccactccaatttttgatttcttcctcgccgttcactcgaataacctttttcccaggatgatcgttgagtttaaatttgatacacgcatgtttaccgtttagttttggtgttaattcgtcttcaccgataggcaaacccaaactttgcagagcttgtagacgatacatatctattcctgtcgtcatctgtaccaggtcaaaaattctgtctccgcctactcgagtgtgtgtttctattagctctatcttttcacccaacataatttcgctgtgcgtaatacccgacacgacccctagagcaggtagcaccttggcaatgaatgcagcaattttctcgtgctcatcgctagataaacgggcaggcaccaaatgccctgtctcgataaagctttgcgcatctttgaatttttcagtgattgcaaaaatatggcatttaccttcttgcatgaatgcttcaacactgaattcgcgaccttcgacaaactgttccaccagcacagggtaaacgttgtctaagttagcggtttcaagctctttactttctagcgatcgaacattttcactgcctgtaccagcaactggtttaacgataactttatttacttgtggataaatcttgaaaaaatcatgtaaatcttgctcattctccgctatcgccgattgcacttctgtcaggtttttttcgcgtaaaatcctgcgacttaattgtttatctctcgtgttgactatagcccccattgacaaactaaaaggtagctctagagcatttgcaatagtcaatgcatcaagctgggctccatcgtgaaaagacacaactgaatcgattttttgtagttgatcaattgaacgcgctaaactgattaactgaattgcagactcgttgctgtacattaatattcgctcgcaacgattgtgatcttcagtcgtatgcgtaaaattaggtacttttttgtacatccaagaaatagcatatccctgtgcttccagtgtcttatgaggttggcgaatattaccaatcacaagaacgtgtttctttttctggggcatacactcgctataaggcaaaggagtatcgacagatattagttgtaactgtccaaacaacctatcaatcagatctgtgagttctttagcggatttggcttttaataatccggctaacggaatttcactttctttataagtaaccgctttgactaaaggttgttgcatcgtaagctgattcagcattacaacctcttccttgccataaagaaactcatgccccgacaccaagccatagtttcctggcagctgatgtccaggcacaataaaccacgcatatttgtacccggtatcatagttaagttcaaatttgaagtctgggtctagcaacaatccaagttccagtatcgatggatgaatccctgtctgtaacgtcaaagtttcagctattctagctcccccgatacgatgagcgatttcaagaaacaccggccctgtatctgtttgaatcgcttcaagatggaacgcccccaaagatatatcaaccgcatttaagatttgaagcgcccaggttttcatctcttccgtggtttctaactgcacagaccctgctggatagccgttggcaaaatccagcaacgtattgatatattggctgacgacaatcatctctatttgtccgttacggatcatgccgtcgatatgcaatacaggaccggatacaaattcttcaacttcaaagttttcaatccgttcaggtgtttctttatcaagagccacaattccagttgtgcgatctataagcgcctgttccaaaactttctgactgtcaaacttgaccacatcaactgacgaagcaccatccagaggctttaaaataacttgtgaagagggaggaatcgctagtcgttctgagttcataaaatcggacaaagacatgtactgaggaatacgaatatttacagcgccaacacagtgtttcatcacaattttgtttcgaactttttcgacatcggccactttagggcccgcaatgttgagcttttctcgtatcaaggcagcctcaatcaattcaaactcattaattgaaacaacgtgatcaaagcaaacatcaagattttctatttgttcgaggacttctttgtgtacagcatccacgccgggtcttactattttggtacaacgtagatcggcaggaatttcattcagattttcttcgataccaatgtagtaaacattatgtagttcgtgatcgatggactgatggtaaagtacatcaacgtacctaactcggtgtaaaataagtatattcattagctttcatccatttcgaaaatttgttcagtcaattgttgtgtaagcatcaagtactctttcggttttccatttagctcatagtctggccagaagaattcaacataaccctcaagctctgcgttgctgtatagtggattgacccgagctccttcggatgtccaaagttgcagtccaaataccccttttggtaactcgtgctgagctggcaacttaattcgctcaatcgttccttgcttagctttcataaatccaatcgcagctagtccagacatgtgatatgcaggtacttcaacttcatcgtatagataagagcgagaatgaagttcgagcatattcactccagctattttttcgaatatttcaggaatgccaccgcctggagtacgcgcattcaactccagtaggtaaatcttgccactgtgatcaatcataaattcaacatgagctataccatgttcaacatccaagacttcacaggctttaagcgctgcttgtttaagcgcttcgttatcagattctatacttggtaaggaatggccgatttcaacaaaatgaggtaacggggtcagttctttatcggtcactgccaatacacgtcttccagttttggtatttagtacttcaaccgaaagctcaattctagcatcgacaaactgttctatctgataatcgttatctgctataccaaactcactaccataattttcggtcactcgacgcaagttagcaaaagcactagccaaatcatctttgctagctacgtaggttacaccttcactgcccccggcgttggtcggctttacaactgctggaaaaggaaaatcttcagcaagggtcgctagctgctcaaggtgattaaaacgtgcaaacttcggaacgttcaacccacctgcatgtgcagccttacgcatttcaaatttgttgcgggttaatgtcagcgctttttcagacaaataatttaaattatagtactgagcgatacgagcccccggggctatcgtcatttctgtcaatggaacaactgcgcccggttgcattccttctcgctcggcaaaggtctgtactgcagccagagcttgttcaatgttttctgggttaccgtcaatcactagatcagcgtaacggtttccattaacataaccacttggggccatgatcgctattttcatgttggttgctctagccgtggcaaccaatgcacgaaatctgtttttctctgttcctagtaacaagcagtactttgaattcatcgactcttccttaaaaactcttcgcaaattaactttgtgttattcaacaagtgccaacaccctgcaagggcttcctgaaccaccaacgatgggaagcggcgctatcatgataactgcacctgttggcggtaactttgctaggttcttcaactgagtcaggccatattttcccgccccgtgaaagtaccagtgtacggggtaaggttgttcaaattttccggcttgacccgcgtcggttccaacagtctccaccccgatacctataattggtgtttgctcagccaaccattttgcacaagcttcacttacccctggggtatgaccatgattaagaaaggtatcagcatctgagtctcgactgtcccaacctgagcggaatagcaaccaaccacctacaggtaaaggtccatggacttcgcaccattgatcgacatgttcacgttcgagtaaaaaatctggggctgttacttgatcagatacatcaattacagcggcaggcgcaaccaagtgtctaggaggtacacttgagacatcgatagaatctttgcctgaccgccaatgaacaggggcatcaaaatgagtccctgtatgctcggacatctggatattattccaataaacttctttgcctttttcgtcataacggcttattttttccaacttaaaaggccaaggttgccctcgttcaggcggcaaacgaatcacaggtgtttccgttgacaacggcgctgtaaggtcaagtacctcaactttcccctgcatgaacttcgcatagattgaagatgtcatagtattaagatttccttattctcattatgggcttaatagacaggggttgaatattcagatgtcgaattcgacatcacctcgtcttcataagcaacctgaagcttacgggtcatcaaaccaggacgcccgtccccaatagactttcggtcaacactaatcacaggaacgatttcagcgagagtgccacaggtgaaaacttcatcagccaaatacaactcggtacgatcaatttctcttcgttcacattcaaccgaaagcttatccttcgctagtcttataatgctgtctaccgtaatcccttcaagtacgcctgctgaacctggcggcgtgatcagtcggttatttttgaccatcatgatgcaagatccagggccttcagccacagtgcctctgtgatttagaaaaaacgcagtatcaaaaccatttcgcatcgcttcatgctgagctaagcggctattatggtaatttgctcctgttttaatcctcggtggcattgaatcgtcactgattcgtctccaagttgaaaacgaagccgtcatccctgtgtcataacgcgcagaccttggcataggtaatgctgtaatatgcataccagtgtcttcggtataaataagtgggtcgaagtttttccccatcgcaaaataaggagcgataaccagatgcacatgttgcttaaagttgttttttcgtactaggtcgatgcaagcttcaacaatctcttgatctgtgaaagtgacaggcatgtcaacacacttcatggaatcgcgcaggcgcttgatatgctctcgtatccgatacatatacatttgcttatccgttttattccaatagactcacacaccttcaaaaacatttgcgccccaaaaagcgccctgcgttctggcatgtaaggtacacttttcccaaggcacgcattcaccatttagccatgcgaattctggcgtattatgggtagacgacataagttaatctccgtttatgatgcttcacgctgaaacgttaaggaatcagtaccactgactttttccaggattaaactaagagacggtgcgttatcaagcaggtaatgtcctgctaaatggccatcaggacggataacaaacaatgaatcttgtttttctgtcagggtttcaaaaaacagaatatcgtcgtaagtaacactgataagtctctcgtccacttttggcgagaaatatccttttggtacagcagcaaccaaactaaaatccaaaccattataggtgtggctttgcttatttaaatactgcttcaccttatttgggtctgcgcaaaaaagacaaacaaaccctttcccgaacaacttacgtaagcggcttttttctccgtcgatataaaccactacatccggagagaacgcaccgacataaggtgtccgatggttataatcaatcaaactagaagattcgtaggtaaaaggttctgtcattttcccgtgattcacttgcttacgaagcggtttccagacttctgaaattcgcagcacggtgtcacgccagatttgcttcaaaggtgttggcgggaccatgaactgtatcgtggcttccgtcagtctcaaattctctttcgctgcaaggaacctttcctcatgataagtatccaacaattcatcccctgcgcttcctctaattactagcgccaatttccatgctaggttgtctgcgtcttgaatcccgctgttcatgccgcgagagccataaggtggaaatgagtgagccgcatcaccagcaaaaaacagtcgattgagtctgaacttctccacaactcgctggttaaaacgataggtactgatccagtcaatctgatacggaatatcaccgatgacagacttgatacgcttgtctagttggccatttttcttttcagcttcaatatccgcatctggaggcaattgccagtcgatacgccatatattgtcgggctgaggatgcatcaccaactgacggcctggattaaactgaggatcaaaatgaaagtgacgttctttggttaaagcaatatttgctttaatatcagtaactaaaaaacgatcttggtgagtgtatccggtaaagttaacctctgtcagatcgcgtaacgtgcttctaactccatcgcaggcaattacataatcaaattctagggtctccgtttcggtacagtgtcttacctctagcttaaccttgtcctgttgttgtgaataaccaacgacttcacttgaccacctgagttcacataggggattagcttccaacagcttaacgagctcttgctctatacggtattgggaaatattgacaaattcaccataaccggggcgttcggggtattcttgggtgatcctctcaacatttcgaatataggtgtgcgctatccgccaatgaatcccttcttttgcaatctgttctccacacccgactttatcaagtacttctagcgcatcgccgtggatcaggcaggccttagaaccttttcgaagcagataaggggctttatccatcacgatgctcgtaataccgaatgaagccagtcgagctgataaaatcaggccaactggacctgcaccaataatagcaatcttggttttatttgaactattcatcttagtaatctactcatcaagctgggtttcaaaaacagggatgtctttgacaaaagccaaataaggagtgccttccgtgtaaccagtacccgagccctcacccaacatcttcatcgcaagaccataatgggtttgcttccaacgtttcagcgtcgtagcaaaacttttcatggcttgtttgacctcaccaaagtcgttgctattgaaacgaccactctgttgcgcttgactcaatgcaaggtctaagttatttggccgcaccaacagtttttcttgaacttcagggacagagccgtaagcaatagagttcaaccgatcctcatccggttgtctgcatagtgattcaatacgcttgtagtttcttgattggatcgcacttgcgccttcagtatatgcacgaaacaccttaaaggattccgcacgcatagaagacagtaaatggaaaaaaccgatggcttctttaatttttttctcgcaactttcgaccagaatacttgcctggctaggcgaatcagtgcaagcttcaattgtcgccctcaaaccaactgcaatccaagagaaagtgtattcgaacgtttgtaagacccgaatgaacatatattcgtcgtgaatgagatagacgggtaaattagttgtcatcagcatttgctcatcgttgtgtgttttcctttgctctactgcggcaataaaatgttttgctgattcgataacatattccgatgaaatataggacaacttagcccgttgtacgtatggagtcaccgcttttagagccatagcacaacgtttttcaactaaagtacgttctggtaactgatgtctaaaatttccctctgttactaacccgccaagttcaaatttgagtatatccgccgtaagcagtaacatcatacggtcaatgtgggattgcgcttctgcgtatgctttaatctctgtctggtcatcaggcatgtttaacaattcaagcgccagataagagcggtagtcataagtaccgtcgtatttatccaacaagacattcaaaaaacgtgtgacttgctcaatttcctcactgtttaattttgcgcactcttttctagtaatattcaacagctcgagaaaatattcaggaacgaaatgtttacctgtcttatgatacatgcgaacaacatcctgatatgggaaggttgctttattttccttggcaaaccgcaatatggtgtgaatgctaagattaatagtgattgtttctgaatcactgtaatcacaaagcaaactagtaaatcttggatgctcaagttctaatatatccagcactgtaaaactttccttttattataatttattgaaataattaacttatattcaccatatttgggttttgaagtacgcgcaaatcaatctacatgtttgaacaacttcgtctgccgtattaaagtgatgaaacgcaagtctgagcatctcacctcgcgggcttgtaattatcttgtgctgttttaagtgcgtgtccaatgcaggaacatttggaacaagcaaagcaatatgcgccgaaaataatgttccggggacctttacgattgtcacgtcgcctttttccaaaatgtcgatagcaagttcaactaatgtctgaatatgcagccgaccttgctcaaaatctaaagtcaaaagtgcagttaaggcgctgcttgccgcataaagcgcgggcacagcaggagttccggtttcaaatcgtttggcgcaatcggggaaatccaccaacgatgggttaaaagcaaatggctctttacgtccttgccatccagtcagccccagtgcaacggtgttacgaatgccatcttttacataaaggaatgcaatacctggcaaacctaacatgtacttcatgctgccacagatcaggtaatcacaattcaattcactgacattaattttttcagcacctagcccttggtatgcatcgactaatattggaacttgtgattgattagcgagttctgttattaattcgaccgggtatcgtctacctgtgcggaaactggctaacggtactgaaactaaacatgtattgctgcccaacattgcgcaggtaatggtgacaaaactttcgtctgaaacctgactttctatgcaacgcgtgacgagtccacgactcgcttgttgcaaccaaacatgggacagagacggaaattcatcttccgtacaaagaatttgttctccggaattggctactagcgttgaaataacctgataagcagctatcgttgcgtttggcaaaatcgctatttgtgatgcatctgcgcctataaactcagcaaacaagcgcctggcctgttcggtttgccgctcgaaatacacccacgccagctcattttttgccatatcaactagcatcgtttccatcgctgcatcaaggaactgagaacgaggagaaatactacaactggcaagatggacaaggccatgcaacccgctaaaataattgtcccgaaatgcttgaggtgaatacatagcgactagtaactgttggtattagtcatttcggtacgcaattcccacagttctggaaagaattgcttattcatcagcaccgtcagtttttcaatcggagttcccttggtacctatcgtgttaagtccgatagtacgtactgcgattttataatgtctgctgcgccataaactgaccatttcatcccagctcaccatttcttccattaggaaataaagcggcgacttgtcttcctcggtataaacgcccatcaggtcgatactcatagacttaacaatacgaataaaagtttgatggagttcccgcccaactgattgcaaccgcctccagcctggagattcgaagcctgagccgttgcctaatgcaggtcttactttctgaaagtcatacggagtcatgtatttgaacatttcgagttgcttagtaattaactcaataggatagctggaccgcttaatcaactcggttgcagcaacaaagtctttcttggatagcttttttatcgcttcagccaactcattattgctcagtttcagccaaagctcagtagattgatgaaccacctgaaacaataattcatcacggtggagcatcttttctggcgttacttgcaaattgagcagcgtgggaatgcgcatatacttctcataatcgctatccccttcaccagacagtacacttgttgaataatccctatttcctatcacgttctttctccttcacaaaaacggatcaaagccagccttttatttgcaaaatatcagccgtcaatgtagtgaattaataattcgaacgggcgtcaatgtatataaaacagtgataaatcacaacataaaaaaaacaaaaacaacaaaaaacatacagttaaataacttaatgcgtatttcggtgattgtgattgcctgtttccgctttttctctctcttcctatttttacgccgctgtttttcaagttagttgtcgctaaaatcgcatttatttttctatattttcagaaaatcaattaaacgctgacttttgtagtggctttcttcacgctggcctgatgttttgcactcgggatggcgatgataaaaaaacggggattagtgttttgctgggagggggctgtattgcccacgatgaagtctgccgtggagcgcatggaggttattttgcagattttctgcctagttttcccatgtgataccctcgcagcccggtgcagattgacgtttaagttgctgaaaaatctgacataacagttcttcactgatgtgatgaaaaaggtgagtaaactgttgtttcctatccttctttgctgcttttcgcacagccagcaagcgtaacgtcgtattgacaaagatggaatttgaaattttcgatgttgaaaaactatttttaaccagcttttttaacgatctgaggccactttacagcggcctcatagataagaatttcttattagttatcacttgccagcaagtaaatctttcaccgcatcaccgatgtctgccagactgcgaaccgtcttcacgccagccgcttccagagcagcaaatttttcatctgcggttcctttaccacccgcaataatcgcaccagcatggcccatacgcttaccttttggtgcagtcacacccgcgatgtaggcaacaaccggcttagtaacgtgctgtttaatataagctgccgcttcttcttccgcagtaccaccaatttcaccaatcattacaatggcttctgtttgcggatcttgttggaacaatttcaggatatcaatgaagttagaaccggggatagggtcaccaccgataccaacacaagtagattgtcctaaaccggcatcagtggtctgctttaccgcttcataagtcaatgttcctgagcgggaaacgataccaactttacctgctcgatgaatgtgtcccggcataataccgatcttacattcatctggcgtaatgactcccgggcagttagggccgatcatacgcacacccgcttcatccagttttactttaaccgccagcatatccagcgttgggataccttcagtaatcgtgatgatcagtttgatacctgcgtcgatcgcttccagaatggaatctttacagaatggcgcaggaacatagataacagaagccgttgccccggttgcttctaccgcttcacgaacagtattgaaaacaggtaatcctagatgttcagtaccacctttacccggcgttaccccaccaaccatttgggtaccataagcaatcgcttgttctgaatggaaagtaccttggctgccagtgaaaccctgacagataactttggtgtttttatcgattaaaatagacattattattttgcctccactgcggctactgcttgcttagctgcgtccgtcaggctggttgcagcaatgatattcaagccactatcagccagttttttcgctcccagctcagcattgttcccttccaaacgaacaacaaccggtacgtgaaccccgacttcttccaccgcaccaataataccgtcagcaatcaggtcacaacgaacaataccaccaaagatattaaccaataccgctttcacgttttcatctgacaggatgatcttaaacgcttctgtaacacgctctttggttgcaccaccaccgacatcaaggaagttagctggcgccccgccatgcaatttaacgatatccatcgtccccattgccaagcccgcaccgtttaccatgcaaccaatattgccatccagcgcaacatagttcagctcccactgtgccgcctgagcttcacgaggatcttcctgagatgggtcatgcatttcacgcaattcagcctgacggaacagtgcgttaccatcagcgcccaatttgccatccagacaaatcaaatcaccttgagtcgtaataaccaatgggttaatttcaaccagagccagatcgcgctccaggaatagatttgccaaccctaagaaaattttagtgaactggctaacttgtttaccggttaaacccaatttaaatgccagttcacgcccctgataagacataggaccaatcagcgggtcgataatcgctttatgaatcagttccggggtctcttccgcaactttttcaatttcaacaccaccttcagtagaggccatgaacactacacgacgtgtaccacgatcaaccacagcaccaagatacagctccttcgcaatatcagttgccgcttccactaaaatctgacgaacaggctgcccttgcgcatctgtttggtaagtgaccaaacgtttgcctagccactgctctgcgaaagcgcgaatttcttctttactgttaactactttcacgccgcccgctttaccgcgaccgccagcatgaacctggcacttcaccacccaagggccagagccgattttagatgcagcttcttctgcttcacgcggtgtcgtgcaggcataaccagccggagcgggtaaaccataccgtgcaaaaagctgttttgcctgatactcgtgtaaattcatgatgttctatccataattaagtctgagaagagcaaaaaatgggtaagttgctctctgatttttttgttgctctggatatagccaatctctaaagattggctgttcatatacatttgtttacttcagactgggcagatattagcgcgtatctgccctgattatgttgctatacgtccagcagcaaacgtgcaggatcttccagcatttctttgatggtcaccaagaagcctacagactcacgcccgtcaatcagacggtggtcataagacaatgccaggtacatcattggaaggatctccacctgaccattaaccgccattggccgatcttttatagcatgcatgccaagaatcgcactctgtggtgggttaatgattggtgtagacattaaggagccgaatacaccgccattggtaatggtaaagttaccacccgttagctcttcaacggtcaatttgccgtcgcggcctttgatagccagctctttaatgcgtttttcgagatcagccatgctcaacgcatccgcatcacgcagtactggcgttaccagaccacgtggtgtcgataccgcaatactgatatcgaaatagttgtggtaaaccacatcagtgccatcaatagaagcattcacttctggatagcgtttcagtgcttcaaccacggctttcacatagaaagacataaagcccagacgcacaccgtggcgtttttcaaacgcctcgccgtactgtttacgcatttcttggattggcttcatgttaacttcattaaatgttgtcaacatcgcggtgttgtttttcgcttccagcagacgttcagccacacgcttacgcaggcgagtcattggcacacgcttttcactgcggtgtggcaacagagaaccctgggcagaagcagcagaggattctgctggcttgctagccactttttcgttatcagccatgtatttttccacgtcttcacggacgatgcgtccaccaaccccactgcctttaatcgctttggcatcaagatcatgctctgcaatcaaacggcggaccgccgggctgagtgcatcattgctctcttcgtctaaacccgccgtctggcgtttcgccaaagttgcttctgttttttcttttatttctgccggcttgccggtgctatcgcccaagcggatacgaccaagaagctgacgggacagaacggtggcatctttctcttctaaaatggcttctaaaacacccgcctcactggccggcacttccagcacaactttatctgtttcgatttcaaccagcacttcatcacgttcaacacggtcaccctgttttttgtgccagactgccacagtggcatcagcaacagactcaggcagatccggaaccagaatatctacgctactcattttatatcctttatttattcaacgttcagtgcgtcattaaccagctcttgttgttgttgctggtgaactgacatatatccaactgccggggaagcagacgcaggacgacctgcataacgtaaagaagccccgaacgggatcacttcacggaagttgtgctgactgcaataccaggccccctgatttaatggctcttcctggcaccagacaaaatcatgtacatgagcatactgttccagtgttgactgaacatcttgatgagggaatggatatagttgttcaatacgcacgatagcaacatcagtttgttcatttttacggcgttgctccaacaggtcgtaatagactttacctgagcaaagtaccactcgtttaatacctttcggatccagagcatcagtttcaccaataaccgtctggaatttaccgttagccaactcatccaggctagaaacggctaatggatgacgcaacagtgattttggtgacataacgatcaacggacggcgcataccgcgcaaagcctgacggcgaagcatgtggtagacctgagccggcgttgacggcacacaaacctgcatgttctgttctgcacacagttgcagataacgctccaaacgggctgaagagtgttcaggtccctgcccttcataaccatgcggtagcaacattaccagaccgcacatacggccccatttctgttcaccagagctgatgaattggtcaataacaacctgtgcaccattggcaaaatcaccaaactgtgcttcccagattgtcagagcgcgaggttctgttgttgcatagccatactcaaacgccagtaccgcctcttccgacagaacagaatcccaaacattaaatgctccctgaccgttatgaacgttcgccagaggaacataaacagaaccgttagcctgattatggataaccgcatgacgatggaagaaagtaccacgaccggcatcttcaccagacaaacgtaccggaaccccttcatccactaaagttgcataggtcaatgtttccgcggcaccccagtcgaacaatttatcgccgtttgccatctctgcacggtcgttataaattttcgctacacgcgagtgcattgtcacttcttccgggacagaactgatgcgtctaccgagatcctgcaaacgtttaacatcaactttatgtaggtattcttcatcccattcgtgattaagataaggctcccaagtaaatgagtgcagccccattgaacgccactcatcaacgacacaatcaccacggtcaagggcatcacgatacaggttaactatctcggtcacatcatcgactgatatcaagttctcagccaccagcttgtcaccatagattttacgtggcgttgggtgtttcttaattttctgatacatcattggctgagttgcacttggctcatcagcttcgttgtgaccatgacggcggtagcaaaccaaatcgatcatcacatcacatttgaaggtattacggaaatccagtgctaggcgggtaacaaatgccaccgcttctggatcgtctgcattaacgtggaaaatcggtgcctgtaccattttgataatatcggtacagtattgtgttgaacgggcatcttttgggttagacgttgtgaaaccgatctggttattgatgatgatacgaattgtaccacccacttcataaccacgagcttgagacatgttcagagtttcctgcaccacgccttggccggtaacagcagcatcaccgtggatagtgattggcaataccatattactgcgaccttcatccagacggtcacggcgggcacgtactgaaccaataacgacagggctaacaatctcaaggtgagatgggttaaatgctaatgccaaatgaaccttagccccctcagtggcaaaatcagacgagaaaccttgatgatatttcacgtcaccggtaccgagatgctctttatgcttacccgaaaactcatcaaacagatcagccggttttttacctaagatattaaccaagacgttgaggcgaccacggtgagccattcccagcacaacttctcgtgtgtcatgtttacctgcatggcggataagatccttcaacatggggatcagcgcatcacccccttcaagagagaaacgtttcgctcccggaaacttcgctcccagataacgctccaaaccttcggctgccgtcagttccgccagaaaacgatgtttttcctctacgctaaactgagagctgacagtgacagactccagacgctgctgaatccaacgtttttcttccgtattggtgatatgcatgtattcagcaccaatagaaccgcaataagtgcgtttcagtgcttcatacaaatcagccaatttcatcgtctctttgccgatcgcaaaagaacctacgttaaatgtttctgcaaaatccgcttccgtcagattatggaaagccggatctaaatcaggaacactatcctgtttccataatcccaacgggtcaaggttcgcattttgatgaccgcggaagcgaaatgcgttgatgagctgcaaaactttaacttgttttgcatccatcgctggatcgctgacagaggaatgataacgcgtagtatctttcgcaagacggcggaagtaatcacgcgtctgcgagtggagttgttcaccgctgagtcccgcattcggcaattgttggaaaatctctctccaacttgcatcaacggagtttggatcggttatatagtcttcatagatctgctctacgtaagactggtttgaaccagccaggaagcttgaatccagccagtccttcattgcgccgttctgcattgtgatcccttaagctttaaaagctttagttttcgccgtggttaactattaccgcttaaatacggtatcgataaaaggttcatttggacgtgctttatgcatgttctcttttgggtttaggaacccttcaaggaacctttaaaaaccgcctaaccgtttttaaaggttcctcacttcaagcttttgtcatcattagcagttggcaactcatactcttcaattctttgtgccctccacggagaaaatctcgcggagggcaggacctattacgcactatgctttagcaacatagacttaatatggcctatagcttttgttggattcaaccccttagggcacacactgacacaattcatgatgctatggcagcggaaaacactgaaagcatcattcagcttatctaatcgtgaagccgtttcagtatcacggctgtcaatcaggaagcgatatgctgccagtaagcccgcaggcccaataaatttatcaggattccaccagaatgacggacaggaagttgaacaacaagcacacagaatacactcgtacagaccatcgagtttttccctttgcgcaggtgactgcaaatgttcacgtgccggtgggtttttaccgtcattcagcaaatatgggcgaatcttctcatattgcgcatagaattgccccatatcgaccaccaaatcacgaataaccggcaaacctggcaacggacggataacaattttcttgctaccacgccgcaaagccgaaacaggcgtaatacaagccagaccatttttaccattcatgttgaggccgtcagaaccacaaacaccttcacggcaagaacgacggaaagagagtgttgggtcctgttctttaagctggattaacgcatccagcaacatcatgtcacgcccttcttctgcttccagcgtgtaatcctgcatatgaggagcgctgtcaacatccgggttgtaacgataaatcgaaaattcaagtttcataatctattcctccgcaactggattaccagcaactcattagtaagtacgcgctttcggcgggaatgcttcacgcagctttggctgcatgttgacatcacgacgagtcatggtctcagtttgcggtagatagagggtatgacataaccagttcgcatcatcacggtccggatagtcgaaacggctgtgagcaccacggctttcagtacggaaattagcagcagcagccgtagaaaatgccgtctccatcaggttatcaagctccagacactcaattctctgagtattgaactctgaggaagtatcatccagacgcgcactcttcaagcgttcacggataactttaagttcctccagccctttcgccattgcatcaccttcacggaataccgagaagttgttctgcatacacgcttgcaaatctttacgaattttaaccggatcttcacccgtacgggtactattccaacggttcagacgttgcaaagatatttcaatatccgattcgctggcttcgcggctagtcccttgttccatcaacgattctttcaggtgcaaaccggcagaacggccaaacaccactaagtccaacagcgagttcccccccaaacggtttgcgccatgaaccgatacacaggcaatttcaccgacagcaaacagacccggaataaccacatcttcaccgttttcgttaaccatcagagcctgaccggtcactttagttgggattcctcccatcatatagtggcaagttggaataaccgggataggttcttttactgggtcaacgtgggcgaaagtacgggataactcaagaatgcccggcagacgagattccagcacctctttgcccaaatgatccaatttcagcttggcatgaggaccccaaggaccttcacaaccacggccttcgcggatttcgatcataatggaacgtgccacgacatcacgaccagccagatctttagcatttggcgcgtaacgctccataaagcgctcgccatctttattcagcaaataaccaccttcaccacggcagccttctgttaccagaacacctgctccggcaataccggttgggtggaattgccacatttccatatcctgtacaggtacacccgcacgcagcgccatacctacaccatcaccggtgttaatgtgggcgttagtggttgattgataaatacgaccggcaccacccgttgccagaatcgttgccttcgctttgaaataaaccacttcaccggtttcaatagagatcgcagtacaaccaacaatagtgccatcctgatttttaaccagatccaacgaataccattcagaaaaaatagtggtgtgattttttaagttctgctgatacagcgtatgcaacagggcatgaccggtacggtctgccgccgcagcggtacgtgcagcctgttcaccaccaaagttttttgactggccaccgaatggacgttgataaatacgaccgtcatccaaacgcgaaaatggcaaccccatgtgttccagttccagaatggcctcgggcccggtcttacacatgtactcaatcgcatcctgatcaccgatatagtcggagcctttcaccgtgtcatacatgtgccattcccagttatcgtcatgggagttacccaacgcaacggtgatccccccctgcgcagatacagtatgagaacgggttgggaatactttggaaatcaaagcacaggataatcccatttgtgaaatttgtagcgcagcgcgcatgccagcgccacctgcaccaataacgactgcatcaaactctcttactggcagtttcatctataccccccacaccacaattgttccgtaaatcaagtaagccatcagtgcaacgataatcgctaattgcagcattaaacgcagtgccagcggctttacatagtcagtgagtacttgccacataccaatccaggcgtgagccagaatggaaaacagtgtcagcacagtgaagactttagtgatggatgaggcgaagaaaccccgccagacttcataagtgatatccggcgttgtaacgataaagcccagcatataaagaacatataaaacaataatcattgcggacgcgcgcaataatagccaatcatggatacccgtgcgacccaatgcagatgcgttacttaccataccagtactccagccagaatcgacagaataacagcaatcccgattgccactttggcagagagactaccaaccgctaagttttcttccaagtagccgaaatccatcagcatgtggcggacaccaccacagatatggtaagccagtgcagtcagaatgccccacacaataaacttagcgaaaaatcccgtcataatatcggcggcttgctgaaacccttcttgcgaggatagagacatttctaacaaccagaggagaattcctactgctacgaaagtatgacgccggagacacggtgcaagatcgagactattgcagagactggaaagtgtatcgtctgcaaatcaaggttgacaggtctttgttttttcacaattttgcccacacagctcttttattattttccttcctccggacttgggcggaaatcagacagcgataagaggatacaaagacacaacatttaatcaaacgatagatccttcatgattaaaaaagtgttgtgatttagttacgctgggtgctcctacagcagggtaatccggagacctggcggcagtatatgtgcttcacattattattacaattccaacacaatatgattagctacatttccactgaacagtgattaagatcacgattcaaacatattgcacaaaattaattatcttgtttgacaaactttaaacatttatcttacatatatggttgaaaacacttttgagattgatttttggtaagaggaaagacctcaagaaaagctaaagttatgtaactgtgtagtccgcacgaatcataatcatttttgtagtcaatgcataaaacataactctcaaaaattcgctaacaacctgaaaaccattgtcgtccggggtgagatttcagccttaaatgtgatattggcctgatttcagcttttccccggtagtacagtgtcaggggacacagtataagaacctattccaccaggcatcataggtatagaccattcttgtcaataaattgggaacacagattgcacagcaaccggagtatgcgcacaatctgtaagaggcgattcacccacaaatcgctcaccggcgctggccacaccaaagtgcattcaaaagtgaccgcttttgtcagagcactgtccaagcccgttcttgatgacaaagaatagtcgataaaatagcctgacaagatagactctatacggtgtctttctgccgtggttgttaagagttataaaaatgaaagcgctaaggagactgtaatggcagataacaaagcaactctagccccagacggttcagttgctattgaattggacgtgctcacaccgacccttgggtccaaagtcatcgacgttcgtactctcggctcccaaggtttctatacctacgatcctggttttacttccacagcatcttgcgaatccaagatcacttacattgatggtaacgaaggtgtattgctgcaccgtggtttccctatcgaccagctagcgacaaaatccacttatctggaagtctgctatatcctgctgtatggtgaaacaccaacacaagaacagtttgataaattcaaaaaaaccattacccgccacaccatgattcacgaacagatccatcgcctgttcaacggtttccgccgtgattcgcatcctatggccgtactgtgtggtgttactggcgctctggctgctttctatcatgatgctctggacgtgaacaatccacgtcaccgtgacattaccgcctaccgcctgctgtcaaaaatgccgacagtggccgccatgtgctacaaatactctatcggtcagccattcgtttatccacgcaatgatctctcctatgcaggcaacttcctaaacatgatgttcgctacgccgtgtgaagagtataaagtgaacccagtactggaacgcgctatggatcgcatctttatcctacatgcggaccatgaacaaaatgcatctacctcaacagtacgtaccgcaggttcttctggcgctaacccatttgcctgtattgccgcaggtatcgcttctctttggggccccgctcatggcggcgcaaacgaagcttgtctgcgtatgttggaagaaattcagtcagttgaacatattccggaattcattaaacgcgccaaagataaaaatgatgctttccgtctgatgggatttggtcatcgcgtttacaaaaactatgatcctcgtgcaaccgtcatgcgtgaaacctgccatgaagtgctagatgaactcggcctgaatgacagcctgctggaagttgctatggaacttgaacgtatcgctctgcacgatccttattttattgagaaaaaactgtatccgaacgtggatttctactccggcattatcctgaaagcaatgggtattccatccactatgttcactgttattttcgccattgcccgtactatcggctggatcgctcactggaatgaaatgcatgatggtggcgtgaaaatcgctcgcccacgtcaactctataccggctacacaaaacgtgatttcgatagccagcttgaaaaataataataaaatcccattacgatagaaggcagagctctaacttaatcgttagggctttatttaattggaaagattattcggtgagtacggcttaaagcaccgtcaaaattgatctcatcaccttccttatgtatgctcgttatccaagagtaggtacaagcgacttactctctaaattatcaaacgtagcctctatttgcgtgtgtagcgagatcaccaagatcaaaattcacagctctatgaatcggatagaataacgttattgacaaaaaaacgttagttatgaaaagcctgtcaaaagctttgaagcccgccgttggtgggcttcgtttatttccgtcttaggaaaacgtgattaaaccgggtttggaatatcgataaaagtgacatccagaccataatgaccagccaaccactcccccaacgccttaataccataacgttcggtggcatgatgacccgccgcataaaaatgcagccccatttcgcgggcgatatgaaccgtctgctctgacacttcaccggtaataaaagcatcaacaccaaattccgccgcctgttgaataaaactctgaccaccgccggtacaccaagcaagcttgcgaatctctgcgggtgcattgtcaccgacatacaacgctttgcgacccagcgcctgttcgatacgtgcagctaactccaccggtgttattggctgttcaaattccccatgcggcacgaatggctcaaccaacccgaccactttcgcattaatcagacgggccaattgcacgttatttcccaatgatggatgggcatcaaggggcagatgataaccatataaattgatatcattacagagcagcgttttcaggcgattacgtttcataccacgaatcactgccggctcatttttccagaaatagccatgatggacgataacagcatcagcctgaaggcgaaccgcttcatccaataaagcctgacaagcggtcacaccagtaacaattcgctgaatatgagcacgcccctcaacttgtaaaccattgggggcataatcctgaaaatcaccaacattcagctcttggttaatgacattttccagctcaatattacgcatcatatttgtcctgtgtattgattgtatgacaataatataccgttacctgccgccaattgtcagttgtcagctacttttgattgccaaaacctgctctgactgttttaaccatacgggcttatcgctggtttttacccatacacgatacaaataactgtaaaaacgggcgcgatcacgacgaaacaacataaccggaaacgccaggataccgaaagtgacagcgccaatacggcgtaaaagaacttgataccaaggatactcacgatatgaagacatattagtcctccttaaaatgatcccacttttccgcaggatcttaaaaataatcaatctgtaaattgtttaaaattttatcgcaaaaaatgaaaatttaccacttatcagaccacttttaagccgttattgtcgctatattttctattttatgtaattttattacataaaatatgataaaaatgtaatattacaaacattttattaacagttggtaaaaatgggatcaacgataatcagagtcaattttttcatgatccttgatcctattcctataatcatcgatttcactttgctttaggaaaagaactagactcaatagataattcttattgaaaaaaataaagaaattaacgaaatagccatgtgaaaatatccttttgattctggcaatagaacaaggattgccaatataataattttcattgataattattatatgagcacggaaaaatgatgtcatcctttgcaccatgctgttttcccagaatacttgtgaattaactataataggaggaaagatgaaagcattaactgttatattattgatattaataacaaatgtttcaggctgcgtctccaaaaaacacgctttttctattgactataaagcaaatggtgaaacttttcatttaactccattatgtatagaagaaatttttccggaaaaaggggataattactattccattttcatcaaagtaaaaaataactctcattgtagcaaaccatttaatctttttataaagcaaaacgtaggaaaaaaactatctgttttctttaacaataaaccaatattgaaaaataccaatataattacgccaatgcatgtcgaaaatggcttctatcaggcaatagattcgaatataacatttgaagaaatagtcaactctttaaattgatgaaaatctatggcttttttcccgaaaaaaaccatagattaattaaatatttttttaaacaattcatatatacccgtaatcattgaagatgcttgattttatccgaaatggagatcattatcctcgctatgaaaatattcattaccgatgaacaaaaagccgaacttgaacatctccatcacacctgccgtgataagagggagtgtgatcgcatcaaagcggtcctgctggcctctgaaggctggagttcagtgatgatcgctcaggccctgcgtcttcatgaaatgaccgttaaccgtcatatcagcgattaccttaatcaaggtaaacttaaatctgataatggggggtctgatagtttgctttctcaagaacaaactgattttttaatcaatcacttatctcaacatcttttccatcacacccatgaaatcgtggcctatgttgctcagctctggaatattacctttagcattcccggcatgaataaatggctacaccgtcagggtttttcttataaaaaaccttgtggcgtccctcataaattcgacgcagaaaaacagcgacaatttattgaatattatgagaatcttaaagtcacagcgaaagacgaacccatcctttttcttgatgctgttcacccgactcaaggcaccaaactcggttatggctggatgcgaaaaggcgagaaaaaaacagtaaaaacaacaggaagccggactcgcctgaatatattgggcgcgctcaacctgaatgccattggtcgtacggtgttccaggaatatcaaaccatcaatgactacaacatttgctgttttttcaatgaaataagaaagtcttatcctgactatcatcaaaaaattcatcttattgtggatggggcgggttacaacaaagctcatcttgttaaggagtgggcttatgttagcaatattgagttacattaccttcctccctatagcccaaatttaaacccaatagagcgattatggaaggtcatgaatgaacaggttcgaaataaccgttattttgcggataaacatgaatttcgagacaacgtcttcaaatttttcaccacaacgctaccggatatagcggactcgctgatgtctagaattaacgaccattttcaggtgctaaaaactgcatcttgaagtttcttgggtatatagcgtattttttaaatcctaataagaaactgtaatttaaattgtgtaatcgcctgtttttggcatatttgatttatcaactaaaacaagtgaaatgatggaccaaaaacagttacaagctctggctaaaagccttaaaaccccctaatgactttggcctccttttattgccatttttatactttttttacacatctcctcactcttttatcagcttctttgcatccccttctctaatctttacccaatggatttcaagatgaatcgcgacggcaagggagcgaatccccgggagcatagataactatgtaactggggtgagtgagtgcagccaacaaagaggcaacttgaaagataacgggtatttacccatccaagttttcaggagataagcagtgagcatattcttcatttccggcgcgttattagtagccctgttactggtttatctgatttacgcgctacttcatgcggaggatttttaaatggcagcatccgcttttttattgatcaccagtttcttactgattttgatgctactggcaaagccactcggaaatattatcgccaacctgatcgacggtgatattccacgctggctaacaaaaatagagtctggcctttggcgttgctgtggcttacagaaacctggcggcacagtcaaagaaatgaactggtggcaatatgcattagctatcactatttttaatctaaccggactattactgctattcacgcttttagtcacacaacacgccctcccccttaatcctgaacatttccccgggctcaaatgggacctagcgctgaatacagccatcagctttatcaccaataccgattggcaggcatacagtggagaaaacacactaagttactttagccaaatgacaggtctaaccgtgcagaactttctttctgccgcgaccggtattgcggtggcatttgcgttgatacgcacattttcccgtcacggtgtcaacaccgcaggaaacgcttgggttgatatcacacgtatcacactttatctgctattaccgctgtctatggttatcgctctagtttttgtcagtcagggcgtgattcagaatttcgagccgtatcaattagctcataccattgaaggccaaccgcaattgatcccgatgggcccggtcgcttcacaggaagccatcaagttattgggaaccaatggtggtggattctttggggctaattcatcacacccctttgaaaatccaactgctatcagcaatttcattcaaatattgtctatcttcttgatcccttgtgcactctgttttgcctttgggcaagtggttggtgataaccgtcaagggcacactctattgtgggcaatgagcatcatcttcgtcattgccaccgtaggcgtcatgtatgccgaactgaaagggaatctccatttcagtctgttaggtgccaacagtaatatcaatatggaaggtaaagagaatcgctttggcatcctcgcaacctccatttatgccgtcgtaaccaccgccgcttcctgtggcgcagtcaatgccatgcatgattctttcactgcgcttggcggcatgatcccaatgtggttgatacaaattggcgaagtcgtgtttggcggtgtgggttctggtttatatggtatgttactgttcgttctgctaaccgtttttatcgccggtttaatgataggccgtgcgcctgaatatctcggtaagaaaatcgaagtattcgagatgaaaatggtggcactggcgattctggttaccccgacactggctcttttaggaacggcacttaccatatccactgccagtggacgcgccggtattctgaaccccggcgctcacggtttcagtgaagtgctctatgccctctcctccactgccaacaataatggcagtgctttcgccggcctcaataccaacaacatgttctacaacttgttgctagccatcatcctatttttgggtcgctttggcatgatcctgccagtacttgctattgccggctcgttggccgtaaaaaaacgccagcctgccagcaacggtacactgcccacctatggcccactgtttatcagtctattaattttaaccatcatgctaatcggtgcgttgacttttattccggctcttatccttggcccggtcattgaacatttacaaatctggctaatggctcggtaagcgccaaagagaggaataccatgaccaacaaacaacaaacattattcgaacccgttttgattcgtaatgccctgatggattcagtcaaaaaatgtcatcctgctgcacaatggcgcaacccagtgatgtttgtcgtctatctaggcagtggattaactaccattttatggattgccatgttagcgggtcaatttaagggaaatgctttgttcaccggtaacattgccttatggctatggtttaccgtgctattcgctaactttgccgaagcgctggcagaaggcagaagcaaagctcaggcggccagccttaaaggggtaagaaaaaccagttgggcaactaaactacactcagccaatcgtaatggttccagagagaaagccccttctgacagcctacgcaaaggggatatcgtcattattgaagccggtgaaaccatcccttgcgatggtgaagttatcgaaggtggcgcttctgttgacgaaagtgccatcaccggagaatctgcccccgttattcgcgaatctggcggtgatttttcctctgtgaccggcggcacccatgtactatctgactggctggtggtcgaatgttcagttaatcccggtgaaacgtttcttgaccgcatgatttcaatggtggaaggggctaaacgtcgtaaaaccccaaacgagatcgcactgactatcctgttgacagcgctgacaattatctttctattggtgtgtgtcactctgctgccattttcaatattcagcgtggagattaaccattctggccaacctatcactgtcacggtattgatagcgttattagtctgtcttattcctaccactattggcggtttactttctgccattggtgtcgcaggcatgagccgcatgctaagtgcgaatgttattgccaccagcggacgcgccgttgaagccgcgggtgatgtggatgtgctgctactggataaaaccggcaccatcactttgggaaatcgccaagcctctcagtttctgcccgtgcctggcataacagaacagcggctggcagatgccgcccaactctcttctttagccgatgaaacaccagaaggccgcagcattgtcattctggcaaaacagcgattcaatctgcgtgaacgtgatctgcgctcactgaacgcaacttttgtgcctttctctgccatgactcgaatgagtggtgttaatgtggaaaaccgcatgatccgcaaaggcgctgtcgatgcaatccgccgccatattgaagccaatcacggaaaattccctgaagccgtggaaattttggtacagaccgtggcgcggaaaggcggtactccgctggttgtcgcagaaaatcaacaggtactgggcgttgtcgcgctaaaagatatcgtcaaaggcggcattaaagagcgattcagtgaaatgcgccgtatgggaatcaaaaccgttatgattaccggcgataatcgtctaaccgcggctgcgattgccgcagaagctggagttgatgactttctggcggaagctacccccgaagccaaactagccctgatccgccaatatcaatccgaaggccgtctggttgccatgacaggtgatggcactaatgatgcccctgctcttgctcaagccgatgttgccgttgctatgaattcaggcactcaagcagccaaagaagccggcaatatggtggatctggattccaacccaaccaaactgattgaagttgtccatattggtaaacagatgttgatgacacgcggctctctgaccacattcagtatcgccaatgatatcgcaaaatattttgccattatccccgcggcatttgccgtcacttacccacaattaaatatcttgaatatcatgcacctgcactcgcctacttcggcggttttatcgaccgttatctttaatgcactgattattgttttcttgatcccgctagcgctaaaaggcgtgagctaccgcccaatgaatgcatcagcgcttttacgccgcaacctgtggatttatggtctgggtggtctgatagcgcctttcatcggcatcaaactgatagatctgttgctgactttgctgatacttaaataaaggtgatgaaaatgatttggttacgttcttctgttgtgttgttgatatttctgacactgattaccggcgtagcttatccattgctggcaacaggtttgtcagaactgatgtttccttatcaagcccaaggctctatggttaaacaagatggtcaaaccgttggctctgagctgattggtcaaccctttactaaagcgatctattttcagggtcgtccttctgctaccgtagattatccctataacaccctgtcctctggcggcagtaatttagcgactaccaacccgatattggatgatgaaatcaaacgcagagttgaacaactgcgtcaatttaatcgtcaacctgatatacctgtgccggttgatctggtcaccgcatccgcaagcggtcttgatcctcacatttcacccgccgccgctgactttcaagcacagagagtcgctgatgcacgccatttaccgattaaagtgataaaacaattaatcagggataatattgagcaccccccatcggaattcctcggtgagcccgtaattaatgtgttaaaacttaatcttgcccttgataatttaccagagaaaaaacagtaaggctgaatatggatcaacacgaaccacagcgccctgaccctgatgaattactgacactggttaatgagaaacagcgcggtaaattaaagatatttttcggtgcctgcgctggcgtcggaaaaacctatgccatgttgcaggaagcgcaaagattgcgtgctcaaggactggatgtggttatcggcgtggtagaaacccatgagcggcaaggaactgccgctttacttgatggtctgccacaactgccactgaagcagatctactaccgacggcgcaaaatcagcgtctttgatcttgatgctgccattgcccgccacccggccatcattttgatggatgagttggcattcagtaatcctcacaccaaccgtcatcccaaacgctggcaagacgttgaagaactgcttgaagctggcatagatgtactgactaccatcaacgttcagcatctggaaagcctcaatgatgttgtgggggatattaccggtatccgggtcagggaaaccattcctgatcatatctttgatcaagcgaatgaaattgtcttagttgatctgcccccggatgatctgcgccagcggctcaatgaaggtaaagtctatattcctagccaggcagaacgtgctattgaacatttttttcgcaaaggtaatttgattgcattgcgggaactggctttgcgccggacggctgatcgggttgatgatcaaatgcgtgctttccgcgacacacaagggcatgaaccggtctggcatacccgtgataatcttctactatgcattggtaacagctcaggtaatgaaaagctcatccgcactgccgctcgccttgcggcccgattaggctgtatctggcatgcaatctacgttgaaaccccaaaactgtaccaactacccgaaggtaaacggcgctccatcttaaaagcgctcagattagcgcatgaattgggggctgaaaccgcgacgctttctgatccaaacaaagaaaaagcggtattacgttatgccagagaacataacctcggcaagattctgataggccgccgctgtacatccaaacagaaactgtttggctggcaatggcgttcaggttttgctgaccgactagggaaactagggccagatttggatctggtgattgtcgcattagaagaacgcagccactgggataaagaacaagacaaccgctctgtgagtgaaaaatggcgagtacagattcagggctgcctgatcgcgattgcgctctgtacacttatcaccttgttctcccgaacgtttttactgacccttgataaagccaatcttgtcacgctttacctgcttggcgtcgtcgtcattgcgctattttacggacgccgaccatcaatctttgctgcttttattaatgtcattagtttcgatatcttctttgtacagcctcattggtctcttgctgttaccgatatgcagtacctgctgacttttagtgtcatgctgatagtgggcgtcgtcgtcggaaacttaacagcaggaatgagatatcaggcgcgaattgcccgttaccgcgaacaacgaacccgcaatctctatgaaatgacccgtgaactgagccgagcgctgaatgaagaagatattgcccgcaccagctaccactttcttactaatggttttcaagctaaaactggcctctttttacccaacgacgatggcaatttatatcaactgacgaccaataatggcggtcacatgctgattgatgatgccattgcaaaatggagttttgataaaaacctgccggccggagcgggaacagatacgctacctagcgtaccttaccaactacagcctatcgccacaccttctcaaacactggcggtattggctattgagccctcctatttgcgccagttactgatccctgaacaacagcgattgctgcaaacatttaccggcctgatcgccaatgcgctggaaagattacaactctcacgccgggcagaatccgccaaattggatacagaaagggaacagttacgtaactcgcttctggcggccctgtctcacgatttacgcacaccgctgaccgtcctattcggacaagcggaaatcctgatgttggatctctctgccgaaggttctccacataccaaacaggtgaatcagatccgccaacaaattctcagcacttcccgtctggttaataacttactggacatggcgcgtatccaatcgggaggcattcagctcaatctggaatggcaatcgctggaagagatcgtcggcagtaccttacgttcgctggaatatgcactcaaccgtcatcccgtcgcggtttccctgccatcggatttactgttgcattgtgatgccagtttactggagcgggtatttatcaacctgttggaaaacgcaattaaatataccgatgaacaaataccattaggtattaaagcgacaacagaaaaaaatcaaattcatattgaagtttgggatgcaggcaaaggcattccgccggaacaagaacagttaattttcgataaattctcccgcgctcgtaaagaatctgctattcccggcgtgggccttggattggcaatttgccgggcaattattgaaattcaccaaggaaagatttgggcgagcaataacgaaaaaggtggagcaagttttcactttgttctaccgttagagaaaccgccagaaattattactgaggagatgtgattattaccaacaataacaccatcttgattattgaagatgaaaaagagatccgacgctttgtccggctagcgttggaaggtgaaggctatcgcgtatttgacagtgatacactgaaatggggcctgattgaagcgggaacccgtaagcctgacttaattattcttgatttgggattgccggatggtgacggtattaacctaatccgcgatctgcgccaatggagcgcaattcccgttattgttctctctgcccgtgataaagaagcggataaagttgcggccttggatgtcggcgcagatgattatctgagtaaaccctttggcatcagtgagctattggcaagagtccgggttgccttacgtcgttttgccagaaccaacagagaagaatcgatcgttcatttttctgatgtggttgtcgatctggttaaccgccgaatcactaaaaacgatgaagaactgcatctcaccccgattgaattccggttactcggtgaattattagcgaatagcggtaaagtactcacccaacgccaattactcaaccaagtttggggccctaattatgttgaacacaaccattatttacggatttatatggggcatttacgacaaaaattagaaaccgacccaaccagaccaaaacatttattgactgaaaccggcattggttatcggtttatgccttaacttgcccccgccgctaagtcacaagattctagttgcagcaacttgagtttgaaatatcgcaaacctgcatttatgtattgcgtttttcggtgcatattagctgctatttactggtgctcaaactcacaataacgacaacatttgaacaaatatatagatcgcgaggtgggaatattttaaattaataaaggggaaataaattcccccaaagataacgctgttttcagcgatttccaaatggctaaaactcacctattcatatttttcatttccacccagcgctatagataagataatgaacattatcatcctcagtagcgttagctctctcacctctttcatctaagacatcgttatatccataaggaagtatcatgctggaaccacaactgctgcataacaattgaatgtcctttatcgccttctcggcggaatatttcgctggtaagtaacacaaatataaatattgattgggtgagatataaatatcttgagggattttaacccaatctccctccggacttttatctcttacagtgatgaactttaattcagtgatacaatccttattatcgatattgggatcatattttgctttatgcataaaaagacaaatattacccttactattcagattttcgtctttagtggattttaatccaatatacccttcaggaggggtgttagtattattgattccaataataatctcatcaatataatccgcatgcacacgtcgtttagcagactccgccggagcccagacagtttcaaaatgctttttaagcttggccttttgtgttctgtctgaacacagttcccaaatccccgtcaaggggttggaatctgcaaagttaactaattcaggggcattgggcacactggctttccagtcttcaaaggcttttttcgctgcggctatttcttctgcggaaggttgatctgcacttgtagcgccaccaaaaggatcaaatcgagataagtcaccgccaatggcgtgggtttttatattggatgctgaacgaaatttctttatatcctccataaatgaatttcctgtacgagcagagagaccgataaatcccgcaaatgaggctgcggcaaccacatcaaaagagtttgttagattcgacgtatatttgttcgtagatgatgaatattgcgcacagccgcccatgaccacgccactcagaaagtgagaaccccaagtattaaataggtcattcatatcctcctcagtatccgccttatcaagggctgttttaacactctctttaagaaactcttttagtgcttctgctgaacttttaagtatatagagatcataagtatactgaatgcgggaaaacgcattttcaaaatccgtcagactatccgtatcaaaatcgactttcagtgaggcactaaagaataaatagttacctttaatgcggcttttactggaaatattgctttgatatgactcaatagattcgcctgatgcattggtatattttaaatccccgacactataacaatcgatataataggggacttttagggttttgccgagaatagtgaccttcttgaaattatcttcactggcattgatttttcgctcatcgaaaagcgaattcatacaacttcccacattacaatacttaccaaaaacatcataacttgtgccgatcatttcagcaccagctataacagtatcatcgaatagggacaattttcgaaaataatttcggtcacgtatttcgacatctctttcgctgttttcctgttctagtgattttcctgttttatcgttagacataatggaacctcatattgatagggaataaattgacaatagctatcgccgcattcttgatgagggttcagaatttcatacctataaaaaagaatagagtagaagtgagaaatatcaacaaagtgatcatgaaaataatggcatatgtatcctgaaatagatgccattcagctcatctaaaatatcaatcattgtcgatgagttcatacttttctatttaaattcatagagtaaaattagcatggcatttatttgttcgctattaccctattgaatattcataactattaacttgtaaataaaaacaatagaaataattttaaaaaacaactaatacacgggatatatgtttcagcgaacagagaacaagagatagagccagctcagctattggcaaagggcgccaagatttgaatcctaacgccccaagtttgcctagcacatattttcagataaataatgagccacagactcttcacaacaagaaccaataatatcggcatcaggaagagcttgttttaccctattatgcgccgttcccatgatgacccctttagctacggttgaaagcatttccacatcattcataccgtcaccaaatgcaatcgttttattcattgggataccaagaaaaccagcgagctgaattaaagcttgccccttcgaaacaccactccccattacctccagactccaagggaatgaaaaagcaatactgacattatcagaaaagagatcaattaaatggcgttctaatttaaccaatgcatcatgatttctactcttatgaatgaaaaaaactttttcaactgcatcacaaggcatttcatcaacacacttgaatgttggattaaaattatcattctggctaaaatcgctaaaattatgattcacttcattggttaaccattgagaaccacaatacatattgatcactaaatcattatctacctgagtttcttcaatcactctttttacgatgtgacttggcaaatgttgtctgatatccaagttcttacaagcactggttaatctggcaccattcgaagtaatcaaatgcacaggtatatcaaaatcaccaataatggaatttacatcagcatggtgcctgccggttgcaaatacaatttgctttcccatacttgataaatcagtaagcactttacgggtaaacttaccaattatatcttcttgaaggagaagcgttccatcgagatctgtggcaatgagattgtacatagggcgttccagtgttaaaggcaattatcatctaagctttattaagcaattcgagcgatgcctgcttggtaaatgtcatcctttcttccagactatgattatccttttcataataaattgtcgcctctgaatcaatctgaggtcttggtgttattttttccaatatcagcatcgtgtcaaggaataattgtctggcatagcgaatagcccgtgtataagtgtcaatgacctcttcaaattcaggataaatagaaaacgagatctgattcacaatcggcccagcatcaataccttcgttgatttcatggatcgtcacgccatgagattgatctccatttttcaaagcccaattaaccggtcttacacctcgatatttaggtaaataagacaaatggatatttaatattttcttacatgaattaatgaattttaaaggcaatatccgcttatgaaatacgacaaaacataaatcgcaagtgaaatcaccattttcatagccgggtagattttcaaccttattatcttcaataacagcaatattattttgataacagaaatcaattaacgtctgatcagtgcttacaggttcgaatttatctgccaccacgtgcgatattttatactctttatgatttaagaaatattgacaaatgaaaattgccaattctcctttaccacaaattaccactgttttgggattattcattcgcaaacctcgttaacttccttgaccacgctaatatcactaatattaattaacccctgcatcaccatacgcaatgaacctattaaaatttcattatcacttggtgttctgcaagaaatacgtaaatagagatcagagcctatatttcctttgccagaacactctttcacatacagaccatgaatatctaacagtaaccgtgatatcgtctttgcatcagaaacatgcaatttacagtaaacaaaattagaatctgtctcaaatgcggtaataccctcgattgagtttaattcttgttgtaattttaatgtatcactaatcactttttcacagcttaatttataactctctctatattgcggtaatcttaataaaaactcttcagcaaaaccattcatattccaaatgggtaacacagctcttattttaccaagtaattcctgatttgcggtggcaatatacccgatacgaataccaccaatgccaaaggttttactcatgctgcgaataacagataaattcttatagttatctaaatgcgttaacattgtgtcatcacgcattttagagaaatctaagaaagattcatcaacaattaagtcgatatttaatgccgacaattcgccagccaaatataacagactatcaataggcgtcaatttacctgtcggattatttggtgactcaatcaccaccacatttggcttttctgctttcgccaacgttaatagttcatcaatatttatttcaaaatctctgctctctttactatagctaaatattgttctgtctttaccaaagcaattagcatattcattaaatgatggtacagtaactaatactttgcctgtataaacatcaggaagccgtttaattatctcagcagcgccatttgaaatacataattgcgttctttctattccgataaattcagataaagcctgctcgactaaacgattcccgccaggataatttaataatatttcatcaaaatgattctttatttcatctttcaattttttaggtggaaagttgaaattgtaaattaagccaaagtcaataataggataacgccagtatccaccatgcctgttttgcacaagatctaatttattattacttgaaatgaaatcacaaatagccagatcataagtattatctacttcataccattgagaattatcaacaatacttgctttaaattcagccatattattcagtaaagagtgtttaaatatatcctcataatataaccccgtcgatccactatcaacgtaactttctagctctttagtaacatattcagcaaaattagcggtgcaaatattataaatatttaccgtcttatattgaccttcttcaacctgatagttgttatctttggtggaatttagcgcaacgatattatcattatcaacttttgcgtaagttccttccatattttggctaagaggagaaacaagtacattaagatctcccgcttttgacatgacaatttccaagcatttcttagtaaagaagatatcgccttcaagaatcagggtatcttgcttaatccaatttctggcgagatataaagaatagatattattcgtcgattcccacttatcgctattaacaaattcaatatgcaagttatatgcgttttgtttaatatgagccattaaaacatcgctcttataacccaccacaataataacttttttaataccgacagattcgatattcctcagcgcattatcgataaatgatatctgatttgtttctaccaaaggttttggtttatttgatgttctcgttgataatctactgcctcttccggcacagagaagtattactgttttcatatgcatagtcttaataaattattttatacccgttatctttcaagctgcctctttgttggctgcgctcgctcaccccggtcacatagttcgctatgctcccggggattcactcccttgccgtcgcgacgcatcttgaaatccatagggtataaatggctgttaaaaggttatttttattgttaaataggaattgacctaagatatagttcattaatgatataaaattgatattgaattaaatatcaattaaatacgatgtcatatataacatgctgatatacccaaaccccgtcaattcttccatgaaaactcgcctctccaccattttcaccccccgtcttgacacccgatcccagaccaaatgtgtgaaaattattaagtacttcacctgacgtcgatataggacttaatttttcattagttagcaaaccatatctatcacttttaaattcaagaggaatattatttttatcaataatttcgacaagttttgagtgatatcccgtacagtgaatcaataaatcatcacaattaatgagtttaataacttcatcatcagaaatttctgaaatattcaagatagaaatatttttatattttctttctttaagttcttgtgcaaaagcaaaagaatcatatcttaaacctgaatatctattaactcggttacttaaagggcaaatatcttcctgtgtaaaatcgtagtcgtaagattctgcgcttgaaggcgaatcaaaaaacaacttgaaatctttattcacaaaaacatttatttttcctgcaaattctaattgctcaataagtctaatcaaacaagaaactgaactgtgtgatgaacccaatattgatatactttttacatcacctttatttataacctcatcataaaaacctttaataaaatcaccagaggtaatattattgctattatgcaataatctggattcgtttggatttccacctatattaaacagtacttttcgcgcggatacaatataatcttcattatttttatgataagttatatcatagttaccctcttcattctgcttaatttttttcacttccgcttcagtcaaaatattaaaccgatcaccatatttgttttcctgaataaagcgggcaattctctccaaatattggccgacaaatctcaattcaacgggcttatctttattggcactaaaatgttcccattccgatgttgatcttatatattgactaagctcatcatcacaaccgtcaaatttctctaaaaatacactacctaaagagttcgcggtaattttatatttctttaatgaaccagaacccaccatctctgttttttctaaaatcagacaattttttatagcttcatcttttaataaatccgggattaatgaaatatttgcaggacctgcaccacacattaccacatcataaaactgcttattcattgacaaaccctaacatttttaacgaaatttgtgtttcaataacattcccggcaaactcatgacgagtctgtttataaccaagaggttgtttatctaaacccgccttaataacatcacgatgattaattgttttattctcattgcgggaataaaccaacagctccttctcataatcaaatgccagacaaggaatacaacttaattttagtgtcttggctaattccagtctatgatgaccatcaataaccacatgcgttgcttcatcaatccagattggttgagtccaaaaaccttcaagtttaactttctctattaactgctcaacacgaacaggacaatgtaattcagttggtctaagatttgagacttcttctaatattaatttcatgtttatcccttagtttaaacatccgacagaaaattaccaacatcaatacacttaatatcgctaataattgaaataacactccaccattaaataattggataacagtaccaccaaccaatggagatatagaaaaaccgatactatagagtgacgctgcaccaaaatatgcgccacgtaaatcatttggtgccaaacgatcaataaaaacattcacacatggaaacaaaatagtttgactgatactcatgataaaagcagccacataccacaataaataaacatcataatatttgaatgaaataaagaacataaattcagataaaatgagtaatacagaccctacgtttattttcgtttctaacgccattttttgcgttaatatggaaaacggtaactgcataacgacaatggttaccgcatgtaacataataagcgaagcaataaactcagcatacccattaaaccctaatgaagtaattaactgtggcaaagttgaatcaaaatggccaaaaataaacatcatgagaatattatttatgaccaacattaaaaacacccggtcatttaataaaaccttcatcgttcctttaaaatcatcattatttgttaattttatttttattttcttaccaaataaataaacagggatcataaaaattacataagatagtgaaacaatcagaaaagaaatagaattaatatccaggcttaattttacgcctaaataaggcccgactaccgcacccgcattaagaaataaataccttaagtacatggcattctctcttacctgcttttcctcgataatatcaccgataacggcttttattgggttattcaccagcgcccaggaaatattcgctaataaagtaccaataataaaaccagattgatgttcagataaccataatattaaatatgccaatgaagagataagacatccaatgatgattatcttagcccggccgactttatcagagaagtaacccgcataaaaacttaatattgatgaaatcgcaatggataaagagagaactaatccaatcatcgatgcagtaaaatgaaactttgtatatagtatgatggatataaaaggccataccatcattgatgttgatcttgttacaaaagtcccaagaaatagaccccatatacatgccggtatggatgtataattactaagagaaaaatttttcattgttattttcttatattatttatattggtatcttttaaaccaagcatttaaaatatttatgcgagtacataagatccacctgccgctacaaaaatcaaatgtagaagcaagaactaggatgatctgtacgataaagcaaattcaatgatatataatttatttttaatatattatcaaaacagatgttaattgcaaacgaaatatgacatttttattacatgttaaacgtaggtcaaatgctggtgatgttagtaagcaacataatgacataagtacttcgcactttaaccggtaaaaacaccggtaaaaagggctcttaatctcagataaaaacctttccgttcaatctttatctattcaaataatcatcaattaactgaaaaactcagcttaatttaatcccaaaataaactgtaatattatgttcaaagtgaaacatataaataaaactgtattttagtttaatagctaaactccggtggggataattattatttatagatttatatgaagtatccgagattaaaactggaaactatctcacgggcccaaaatattcactaactaaaatggggattagtaatgagtttattctttaatttatttaatgaaggtaatataccctatagatttcaagatgcatcgcggcggcaagggagtgaatccccgggagcatagcaaactatgtaaccggggtgagcgagtgcagccaacaaagaggcaacttgaaagatgacgggtatataggatttattcgcgatgagtacctggcttatctatgccttattatcagcgtttactgccgctttagtcgctatcttcgggaaaatcgggttgcaaaatcttgatgccaatacagcaacagcaatacgcgcagtcattatggcgttgtttcttgtcggcgttgttgtcgtacagggaaagttaaatctggtgagtgaaatagtggcaaaccgcaaggcattgctttttatcgttttaagcggtgtggcgggggcattgtcatggctgttttactttctagcaattaaaaacggtcatgtttctcaggttgccccaattgataaactcagtgtcgtgtttgccgtcatcttcgccgttatcttatttggtgaaaaaatatcactgatggccgcaggtggtgttgcactgattactgccggtgcattaatggttgctctgggctgaaaaataaaaaatccgcaaaagccgttaccactgttgcggattctttttaatcggccaaaaagatcaaccggcggcaaaaacctggttaacaatatccagtgcttcctgctcaattttctgccgatgctcagggccaagcaggctttcacaataaattttgtaggcttcttctgtccccgatgggcgagcagcaaaccagccgttttctgttatcacttttagaccgcctattgacgcgccgttacccgaagcttttgtcaaccgggcggtgattggatcaccggcaagcttatccgctttcaccatttctggtgacaacttggctaataatgctttctgctgataagttgccggtgcctgaatgcggctatagcttggcgtaccgaagcgagctgccaacttattataatgctgctgcggattttcccctgttactgcggtcatttctgccgccagcaaacacaagataatcccatctttatctgtagaccacggcgtaccatcaaaacgcaggaaagaagcccccgcactctcctctccgccaaagcccaattcacctttatgtaacccatcaacaaaccatttaaaacctacgggtacttccaccaatttacggccaagatcggcgacaacccgatcaatcatggcactagataccaatgtcttacctatcgcaacactttctgaccattgcggacgatggcggaataggtaatttatcgcggttgccagatagtggttaggattcatcaaaccggcaggggtgacaataccgtggcggtcataatcaggatcgtttgcaaaagccagatcaaacttatcgcgcatggctaacaaacccgccattgcccaaggggatgagcaatccatacgaatgacgccatcatgatccaagtgcataaaacggaatgtctgatcaacttgatcattaaccagcgtcagatccaaattataacgctcaccgatacgctgccagaacgcaatgccagaaccccccaaaggatcaataccgattttcaacccggcccgctggatagcagccatatcaaccacatcacccaacgcgctaacatacggttcaactaaatcctgctgatgcaaatattcactgttcaatacttgaacaaatggcaaacgtttaatgcctttcagacctgccgtgagcaactcgttggcacgacgttctataattgctgtcaaatcggtatctgcgggaccaccatcaggtggattatatttaatccccccatcttcaggaggattatgggaaggggtaataacaattccatcagctaatgctttccccaagcggttataacagaggatggcatgagaaatcgcaggtgttggcgtaaatccattattttcctgcacaatcacattcacgctgttagccgttaagacttccaatacggaaataaatgccgcttctgataaagcatgggtatctttacccacataacaagggccattgattccccgttgcttgcgaacttccgcaacagcctgagtaattgccagaatatgcgcctcattaaaactgtgacgctgagaactgccacgatgaccggatgtaccaaatttaaccttatgctctgagttttccggctgaggatgcaaggtgtaatactgtgatgtaagctgcgctacatttatcagatcactttggcgggcaatctgccccgcgcgcggatgatttaccactttaaatctcccctggacaagagctgcactgaactttatccgtcagcacagccttaatcagttaaattgtgccacacaccttgtcgataaaattggctgagaatttcatgtcctgcataatttgctcaaccatattacgcttacgatcagtattggtgttagtaatgacccaaaaaggtgtgcccggaatgtggcgaggtttagtttgtttaccactggcgagcaatgtctgtccatcaccagcaaaataaacacgggtacgaccatgcatggtatcagtcgtctgggaaaaactttcactgttcaggctgtataacgtagataagatcaacataaaacgctcaacagattttttcttatcagaatagtcatctgaaagtaacaattcacgtatcacacggacagaatcacgctggcgggctaccggcgctttctccacagcactgagaggctgcacattttgtactggctgctcggcgttaaatttcaacattcgccgtaaaatatcagatgcactttcaccaatatgttgtgtgtggctggcaatatagcggtaaaggtcttcatcaacttctatcgttttcatttctatccagtactgttctaaataaaaaattttcaccgattataaagtataaaaagagaaaacaaaacaattaaaatttcaataacttaaaagtatttaaacatgaaaaacagcataataaaatatccgcttttcatctaaaataaatcaatcagttacataaatattgtgaatataaatttcatggtcgaatgtcatatcaatcttttaataccacctactttaggcgttgataatcacataataatttattctgatattatacccagataatgataaacttgattgcaatattgccgataataaattcaatcaagggagatgagactgtgaatggggagattgattataaacagtaaaacagtttaaattcatagagatgtatgtttattaccattaaatcttaatagtaaatatgttttaataaatttgtaaatttttatttgaatataacatttaaattttaccaaaataaatcgtaaccatataagttatatgaaaaaatcatcatatccattattatattttcaatgtgaattatagaatcaataatttcaatcattaatcgttaaaatcataatatctattctttaaatttattcttataaatccaaaacaatattattaaaccaagatttaatataaataaaatcataaacactcaaaaataaaatggattttcatgattttcaatattaagatacagttgcaatattgatatttaaaaaattccagtcagatatacacaatcattaattttgaaatgtatatatctgaccttgtaatttaatcaataagtgaaagctgttgccgtaaataggtacctgaacctaataatcctggttgtggatgagtaatcaaataaacaggaatctgttgtactaacggtttaaagcgccctttatcttcaaatccatgaagaaagttcgattgcctaaagaaatcaagaaaccgcggcactataccaccagcgatatacacaccaccaaaagtccccatatttaacgctaaatttccgccaaatcgccccataatttcacaaaatagtgtcagagcacgatggcaatattggcaacttttatccaatgctcgttgcgtcacggtttctggttctaaatcttccggctgacgatgatccaaaatggcaatggcctgataaaggtttaccaatccactaccggacaagattctttctactgaaacatgcccaaatttacgccgtaaaacagccaatattgcatcttgttcttcactattcgcggcaaaatctacatgaccaccttcacccggtaagcttacccattgcttgtctaccttgatcaaatgagcgacaccgaggccagtccctgccccgtaaaccgctatcggtttgtctttaaccgcttctcctcctcctaattgaagcttgtattcttctgtcagcattggaatagccatagatacagccgtgaagtcattgatcacatctaatttttctagcccaagtgtccgtttcagctcactaatagaaaatgcccattggtgattggtcatttctacccaatcaccgtttatcgggcaagcaatagcaatacatgcataagtcactactgttttttgctctgctaaatagtgactgataatagattctaatccggcgtgttgttttgcactatatgtttcgatccgctcaataaccccattttccaaattgcaaagtgctaatctggcattagtgccgccaatatcagcaacaagtccgtagagattcatttttatatcctaataatcagctagtacaaccattaggtaaagcttatcccatctggcattattggtatagatcgtttaggagtgaataacctgcactcaccccggtcatatagttatctatgctcccggggattcgcttccttaccgtcgcgatgcatcttgaaatctttagggtatatatgggccagcgctcacacgctgttgtctcgcttttatgcggattttgtcttctgagatggtgagtcgtgcgggatgactcggcctacggccttatccttcaagtcagcactatcagaaacacggcttgtaaatctgatggaccggaaaagaaatattattctgttatttaacaaaaaaacatattttcccacaatttatgatgatctttcatcatgataataccgtcaatttagtatgagcccctcatgttgatatttcgtactttagggggtagactaactacgttagttgaagagtaacgcgctaaaaccgaggctaccaacctggtgaatagcattaaagataaatcaccctacttaagggtaaatgcaaaaaaaccaacctcaccagttggtttttttgtttttatctattcacgttctaatccattgaatcaggacaaaataaacttataatcaacggctgttagtttagagatagtgttctgaccgtgtatctactacgcaagttttcttaagccctggctgaagtacaggtggtgctgattcagtgcctcagtcagagcgcgttactcttcaactaacactgatgagaacccagccagacaggcagtgtaaaggcaatggctgggtaaatcgcgctccctaacaggagcaaaacggatgaaagcattcaaagcctttattgatactgctatcatcgttctcaaagcattagttgcgcttttagaattgatccgcgcatttctgaaatagataacggaaacgtagctaaggtcatcggattaaccatccgatggcctttaatattcatatcgggccagcgctcacgcgccgttgtctcgcttcgctcggctcgaacctgcgacccattgattaaaaatcaactgctctaccgactgagctaacgacccatctataagggaactactctgaatatcttttggagtggtgggtcgtacaggatgactcggccttcgaggttttcttcacttcgttcggtgactactggtttcgtttggcaggctttgttaaataaccggatctgtagtacgactaaaggtatggaataaatttgtaagtcatgctggcaattttagaattataagagtaccttgtactctaggataaaggaggttttccagtgagtcatgcgatagagtttatcgaaactagtatgtttacccgacagataaaagagattgccactgatgatgaacttaaagaactgcaacgagagcttatcgagtcaccagataaaggtgatctaatacgtggtactgggggttacgtaaaatcagaatggctataggctcacaaggaaaaaatggtagtgccagagttatttatcttctagcgactgaagatattatctatctggtgatggcttatccgaaaagtaaaaaagatagcttaacggatgccgagaaagcagaactgaaaaaactaacaaaattactaaaagatgaggtgtaatatgagtttttttgacgaattaaaagcatccctagaagaagcagttgaaattaaacaaggtaataaagccgcagcgcgtgtaacccgatacgaagttaccgacgttaaagctatccgtgctcaacttaacatttcacagacagagatggcggaggctttaggcactagccttgatacaattaaaagctgggagcagaagcgtcgaaatccgacaggactagcggcaaaggtgttagctatcatccaagaaaaccctagtttctataaagccctggcgacgcattgattagccggtgtgtcgtacaagtattaaagttacctaccacatctcggttctacctgtttccaagaggccatagtttgagtgttctcattgtttgtgacttcttttgctgcgggccagcgctcacgcgctgttgtctcgcttcgctcggctcgaacctgcgaccaattgattaaaagccaactgttcttactctaccggctgagctaacgacccatctatagggggaactattctggatatcttttggagtggtgggtcgtgcaggattcgaacctgcgaccaattgattaaaagtcaactgctctaccgactgagctaacgacccatctataggagaactactctgaatatcttttggagtggtgggtcgtgcaggattcgaacctgcgaccaattgattaaaagtcaactgctctaccgactgagctaacgacccgcaccaaagatatgtgataccgcctgaaacaatcttaatgaagtggtgggcgataccagattcgaactgatgaccccctccttgtaagggagatgctctaccaactgagctaatcgcccacttcatgatgactattactgcttctataccactgaatttatgattggtgggcgataccagattcgaactgatgaccccctccttgtaagggagatgctctaccaactgagctaatcgcccaatcataaaatcattcttatcacaacgagatggtgggcgataccagattcgaactgatgaccccctccttgtaagggagatgctctaccaactgagctaatcgccccgtcgtgatggagtcgcattatagggatagttcagagtgagtcaacgctttttctagagaaaaatatcgttcgtctcaaaattaaacaagggtgagataattatcgtcactatagggtgcagtttagacaaatacactgactttcctcaataacttcccgttaacagcattgaggaattaaggtgcagtgataaaatgacccccacttttattactttaaatcaccaataacgttcattgaaaagtgaaacgtaattaaggcaatccccgatgagtaaaattaaaacccgtttcgcaccaagcccaactggctatctccatgttggtggtgctcgtaccgcactttattcctggctgtatagccgccataacaaaggcgaatttgtattgcgtatcgaagatactgaccttgaacgctcaactcaggaagctatcaatgccattatggacggtatgaactggttaaatctgaattgggatgaaggcccttattatcagacgaaacgttttgatcgttataatcaggcaattgatcaaatgctagaacaaggcaatgcctatcgctgctattgttctaaagaacatctggaagcgttgcgggaaactcaaatggcaaatggcgagaaaccgcgttatgacggccgttgccgtgataatccatgtcaacatgacccagctcaaccccatgttgtccgtttccgcaatccacaggaaggttctgttatttttaatgatcagatccgaggcccaattgagttcagcaatcaggaacttgatgatctgattatccgtcgtaccgatggctcgccaacgtataatttctgtgttgttatcgatgactgggatatggagatcacccatgtcatccgcggtgaagaccatatcaataatacacctcgccaaatcaatattctgaaagcactcggcgctcccgtgccagaatatgcacacgtttcgatgatcctcggtgatgacggtaaaaaattatccaaacgtcacggtgcagtgagcgttatgcaataccgtgatgatggctacctgccagaagcactgctgaattatttggtgcgtttgggttggtcgcacggtgatcaagaaattttcagcattgaagaaatgactgagctgttcagcctggatgctatcaataaatccgccagcgcattcaatacagaaaaactgcaatggctgaatcatcactatattaataccctgcctccagagaaagttgccgttcatctagcatggcatattgagcaacaaggtattgattcccgtaatggcccacagttggttgatctaattaaattactgggcgaacgctgtaagacgctgaaagagatggcggaatcctgccgctacttctatgaagattttgctgaatttgatgccgatgcggcgaagaaacatttgcgcccagttgcccgtcaacctcttgaagttgtccatgcaaagctggcttcaattactgattggacaccagaaaatgtgcatcatgccattcaatccaccgctgatgagctagaagtcggtatgggtaaagtgggtatgccattgcgtgttgcggctaccggtgcgggtcaatccccaggtgtggatgtcactattcacgctatcgggcaaccccgtactctctcccgtattaatcaagcgctagagttcattgctcaacgtgaaactcaatcttaattaatgcacccaaggcatcacttatcacattgtgatgcctttttgttctcagaaaatctcatttaattgctccctttttatcactttatcaaacactctctataccctatggatttcaagatgcatcgcgacggcaagggagcgaatccccgggagcatggataacgatgtgaccggggtgagtgagtgcagccaacaaagaggcaacttgaaagatgaccggtatatttcacttcaacccattgctcagcctctattttgttaattgatcataaaattgatggctttttcaacgcttgttgtgagaatgatgagttagccgttgacagtatttgcagggtttcatattatgcgccccgttccattaattttgattggggctatagctcagctgggagagcgcttgcatggcatgcaagaggtcagcggttcgatcccgcttagctccaccaaatcctttatattgaaataaggtatttggtcctaaattaggaaataccacactcgtggggctatagctcagctgggagagcgcttgcatggcatgcaagaggtcagcggttcgatcccgcttagctccaccaaaattatcaggccctgaaagccatgctttcagggcattttggtcattaccctatctaaccaccattatcggttgaaaaaacgccaaccttggctagccttttttcaatggcttcaccaacgaatctagtccctctagttttattgctaaagtcatttccatcagcgcacccaatttaccttgtggaaattcacccttacgagcgaaccacaataaatactcttccggtaagtcaatgagcatacgccctttgtatttaccgaacggcattgcagtattagcaatttctatcaggttctctttttccataatttgcacatcgataaggagaaataggtgaaagggaatctgcaccatccatgatgcaatattccacgataaaacgttatcttttacagtaacaaacctgcaatagccgcagacaagaaactgacaagcgttgaaccaaacagtagtttcaaaccaaagcgggaaacgacattaccctgtttctcattcaagcctttaatcgcccctgccacaatcccaatggaagagaagttagcaaaagaaaccaagaataccgacaaaatgccctgtgaacgaggagaaagttctgtcacaattgattgtaagctgtgcatcgccacaaattcgttagcaaccaatttagttgccatgatgctaccaaccttcgatgcttcatctgtgggaatcccaatcacccaagcaaatggataaaatacgtagccgagcatttcctgaaagctcttctcaaacaccatgctgaacaacgcattaaccgccgcaatcagggcaatgaaaccaatcaacatagcagcgacaatgagggccactttgaaacctgccaaaatatattcacctagcatttcgaaaaagctttgaccttcgtgaagattgctcatctgaatatcttcttcactgtcaacagcatacggattaatcaatgataggatgataaaggtactgaacatattaagcaccaatgccgctacaacatatttaggcgctaaaattgtcatgtaagcaccaacgattgacatagaaaccgttgacattgcagtcgccgccatcgtatacatacgacgctctgacatttttcccagtacatctttataagcaataaagttttcagactgcccaagtatcaaagaactgactgcgttaaatgattccagtttacccataccgttgactttggacagcagagtaccaataacccggatgatgattggcaatagcttgatatgctgcaaaataccaatcagcgcagaaataaagataatcggacacaatacattcagaaagaagaatgccagttttgcatccatcatgccgccaaaaatgaattcagtcccttcacccgcatatttcagtaaatgctcaaacaaaccagcaaatcccatgacaaattcctgaccaataccagaattcaggaaaaaccaagccaagataagttcaataacaagcaattgaataacatagcgaggacgaatacttttacggtcactactcgccaaaatagcaaggccgccaatgacaatcaaagctaaaaagaaatgcaggatttgagacatatcacactccaaacacgatagaaagcgagtttttatcaacgcattctatgtaataaaaggcgagcaaaaaagtatatacccgttatctttcaagttgcctctttgttggcggcactctctcaccccggtcacatcgttatctatgctctcggggattcactcccttgccgtcgcgatccatcttgaaatccatagagtatagatatcacattagactgaaataattcttgctgtaaacctttacttaatgagtctgaccacatttttagctgaatcgtataaaataaactttaaaaacaccttatcgcacataactgattattgagaaaagctctcaataatcagcatgtaaacaaaaagttattcacccaataaacggatcatttcttcttcatcaataaccggaatatttaactcattcgctttagctaattttgaaccagcggcttcacccgcaatcactaaatctgttttcttagaaacgctgcccgtcacctttgccccaagtgcaacaagtttagctttggcttcatcccgggataactgatgcaaggagcctgtcagtacaactgttttacccgaaaatgggctatcaatcttctcagctctcgttacgacgaccggttcccagttgataccaatatcatcaatcagatcgtcaataactgtttggttatgaggttcaatgaagaagttaacaacatgtttcgccaccacttcgccaacatcctgaacctctttcaatgcttcctcatcagcagaacgtaatttatccagttcgccaaagtgagcagccagattagcagcggtcgcttccccaacttcacggatacccaatgcataaagaaaacgggcaaaggtggttttttttgctttttccaacgcatctactacattctgggcagatttcggccccatgcgatcaagcccggtcaatttacctgccgtcagcctgaaaagatctgccggggttttgacatactctttatccactagctgatcgataatcttttctcccatgccgtcaacatccatcgcccgacgggaaacaaaatgcctaagcgcttctttacgctgagcaccacacaccaatccccccgtacaacgcgcgacagcttccccttcaatcctttcaatatctgccccacataccgggcaatgttcagggaaaacaactacattactgtcctgtggccttctctcttccaaaacaccgacaacttgtggaatcacatcaccggcacggcggataataaccgtatcgccaatccgcaaacctaaacgttcaatctcatccgcattgtgcaatgttgcattactgacaatgacaccagagacctgtactggctccagacgtgctaccggtgtgattgcaccagtacgaccaacctgaaactcaacatcacgaacaatcgtcatttgctcctgagcaggaaatttgaatgctgtggcccaacgtggcgcccgggcaacaaagcccaatatttcctgcaattccagcgaattgattttgacaacaacaccatcgatatcaaaccccaatgcggaacgctggtttacaatatcatgataaaaatcaataacctgttgactatcggtacaaactttaactttatcgctgaccggcaatccccatttcttaaactgtatcaatcgttcgtaatgactggcgggtaactctcccccctccaatataccaacaccataacagaagaaagccaatggacgtttagccgtaatacggggatcgagctgacgtaaagagccagccgccgcattacgtgggttagcaaatacttttgcacccgtgcggcgagcttcctcattcagtttctcaaaccctttttgcggcatgaaaacttcaccgcgaatttcaatacgagctggaatattttcgccgaatagacgcagtggaattgcgccgatagtccgtatatttgatgtaatattttcccctgttgtaccatcaccacgagttgcagcccgtaccaattcaccattttcatacaacaggctgaccgccaaaccatccagtttcagctcacagcacaccactaaatcctgggtctctttcaggcggtcacgcacccgcttatcaaacgccagataactctcttcatcaaatacgttatccaatgacaacataggaatttcatggcggacctgttcaaaagccgccagaggagcagcgccaatccgctgcgttggtgaatccgatgtaatcaactcagggtattgttcttcaagatcctgcaattcctgcattaaccgatcatattctgcatcagggatttctggtgcatccatgacgtgatacagatattcatgatgacgcagtgttgttctgagcttttctatttgttgagcagttgatttcatgatttataaccagcgataaaaagcccccgactggcgggggcttgaacattcgataaattgattatacctgaacaccaagtgtgctgcgaatacgtgccttatacaattcgattttttgcggtgtcagcatttttcgctcatcatcaagcaccacacccccaacatcagaagcaatacgctgggccgcctgcaacatcagtttaaaattctgactagattctccgtaagaagggaccatcataaatatggaaacccctggagtcgtaaaatcaaccattgtttcaggattaaatgaacccggtttcaccatatttgccaaactaaacaggaccgggccgctacctgatgggttcacgtgacgatgaaaaatctgcatttccccaaactggaagccagattgtagaatactttgcagcaaggactcaccattcaattcctggccgtggtgtgctgctacgtgaagaaccaaaacaatttctttcactttggtctgagcttctttttcgccagccgcctcctgagatttttcttcaatcgcagatccgtttctttcagactcattctgctcttcaaattcaaacagaccgagttggggttcctgctcttctatagctgcccttctcgctgtcgtttcaggctgacggcccgtcagcaacggatcatcgctttcttcaggcgttgcagcatcaatttcagtcaatttttgctgacgacgctcgatagctggctcagctttatactcctgatgagatttcacctgcttatgggcataaggcttttgctgattgtcgaacgcttcatcatcactgtcatcgacgaaactattctgacgatcatgtttatgacgtttaactgggcgatcacgaaaaagcgaagaacgctctttacggctggtccacaacccatgtaacagcaaagctattattgctatcgcaccaacaatgattaatatcagacgcaaatcctgcatcattgctatctctgttgtttaattaagtatgccaccacggcggaatattttctgtattaactgtatttgtcaaataacacaagtgcaagcttatacacacttttcttatcagaaaaatgcctaataagcctcttttgcattttttttatacagaacaatactagtcagtcgaaaatcctgcctatatgatagcgtttcaatcacacaggagagaataggaagtatgctgaatttgacaaaatcgccaaaaaatttgagcggctttcagtatttggtgcaaggttgcaaattaattactcgcccaggcattaaaagatttgtcttattgcctttgttggcaaatgttttgtttctcggtggctcattttggtggctctaccaaaaactggagaattggctcccttggatagtgagcaaagtaccagattggatgcaatggctcagttatattttatggccgctggccgtgatctctgttttgctgatttttacttacttcttcagcacaatagcgaattttatcgcagcgccattcaatggcttgctggcagagaaactggaagcggatttaacaggaatccccgcaccggataccggcgttatcgcactcttcaaagatgttccacgtatcctgaaacgggaattagtcaagctgcgctactatattccacgcgctctgatcttgttgctactctattttattcctgttatcggccagactgccgcacctgtgctctggtttattttcagtgcatggatgttatcgattcagtattgtgattacccctttgataaccataaagtcagttttccaacaatgcgtagtgcccttcgccaaaacaaaataattaatctgcaatttggcgcaacagtgaatattttaaccatgatacccattgtcaatttggtcattatgcctattgccgtatgcgcagcgacggcaatgtgggtcgatcgctatcgagatcaacacgctcctcgtattatgccgtgatattcatttaaggtatccttttagacaataaaaatatatttaagttatatttccattaaccggttgttggcgtattgttgatcggatatcactaaagggagttgaaagacgagtatgaataaaatttacgaagataattctttgactattggtcgtaccccgttaattcgcctaaaacactttggcaatgggcgtattctggcaaaagtagaatcccgtaacccaagttttagtgtaaaatgtcgcattggttccaacatgatttgggatgctgaaaaacacggtatcctacaacccgggaaagagttggtagaacctaccagcggtaataccgggatagcccttgcttatgttgccgccgctcggggctacaaattaacgctgactatgccagaaaccatgagtattgagcgccgcaagctattgaaagcattgggagcgcaactggtgctgacggaaggcgctaaaggtatgaagggtgccattgagaaagctaacgagattaaagctagcgatcccgatcgttatattatcctgcaacagtttagcaatccggcaaacccggaaatccatgaaaaaaccacaggcccggaaatctgggaagacacagacggtgaagtagatgtatttgttaccggtgtagggactggcggtacattaacaggggttgcccgttacctgaaaaacaccaaaggtaaaaatatcaccacggttgctgtagagccggaagaatcacccgtcatcagccagactctggccggtgaagaagtgaaaccgggtccccataagattcaaggtattggtgcaggtttcattccagataaccttgatttgacactggttgatcgcgttttcaaaatcagcagtgaggaagctatcaaaaccgcacgtgaaatcatggtaaaagagggcattctggcaggtatctcctctggagccgccgttgcagcagcggtgaaactttctcaggaaccagaatataaagataaaaatatcgtcgtcattctggcttcatcaggtgaacgttatctaagcagtgtactgtttgctgacttgtctgatgaataaaagtttttaagtaagttacttagatttattgataaaaaagcacctgaatggtgctttttctgtgtggtagatcaaacttttacactttgccagatgatttcttacaatgggtctagtatttaaccaataataattatttcgatgctcgaaattaattagcagaagtagtagtttcagttaagtagttccgcgatctatctttacttcaaactatcaatcagaagcatcggaaagaacaatttttctgataatgaataaaaatttttattacattatcaacctgagagcctatctcagtagacgtcgttagtgctgttcattcttaaccagtaaaagtgaatacagacagcacacatgacccggaacttacgggccgtactaaagaacgttcaagagctatttatcgcttttgccagaacattactcagttcgctctttaggtaaataaaatcgtcttaaatgggataggcagtgaataaacactcaagttaaaatttgtccatgacaagttcttaacttacatagcaaaaatctaagttattgaggaaacgttatgttccagcaagaagtcactattactgcaccaaatggcctacacacccgtcccgctgcacagtttgttaaagaagccaaaagtttcgcctccgacattactctgacttccggtggtaaaactgccagtgccaaaagcctatttaagctacaaactttgggactcactcaaggcactgtagtgaccatttctgctgaaggtgaagatgagcaaaaagcaatcgagcatctggttaagttgatggcagaactggaataactttccattaaccgtaaagccagtcaagatttagagattgtgaatagacaggtattcacttagccgttcctcatccccggataaacttttatctggggatatcagtttaaatgcatgccctaaaacagcagaccatctgtgggctggctctttaaagaataattattagtagttaggtaacatcatgatttcaggcatattagtatcaccaggcattgctttcggtaaagcactattactgaaagaagactcaatcattatcaatcagaaaaaaattagccaagagcaaatcgaacaagaaatttcctatttcaagcaaggtcgtgaaaaagcctcatctcagctagaaatcatcaagaacatagcagcaaaaaacctcggagaagaaaaagctgaaatcttcgaagggcatatcatgctattggaagatgaagaacttgagcaagaaattattgcgttaatcaaaaacgatttaaaaacctcagatgccgcggtttattctgttattgaaacccaggcccaagcccttgaagaattagatgatgaatacctgaaagaacgtgccacagacgtgcgtgatatcgggaaacgcttgctgaaaaacattctcggtatacccattgttgatcttggctccatttcagaagaagtcattctggttgccaacgatttgactccatctgaaaccgcacaactcaatctggaaaaagtactcggctttattaccgatttaggtggccgaacttcccacacgtcaatcatggcccgctctcttgaactgccagcgatcgtgggtaccactcaagcgacgacgacaatccagaatggtgattacctaattctggacgcagtaaataaccatatttacatcaacccgtctgatgcagaaattgaacagcttaaaaagaccaaaaacgaatatctgtcagaaaaagctgaacttgcaaagttgaaagatctcccggcaatgactcttgatggtcatcaagttgaagtctgtgccaatatcggtaccgtccgtgatgtgatcggcgctgaacgtaatggtgccgaaggtgtcggtttataccgtacagaatttctgtttatggatcgtgatgcactgccaacagaagaagaacaattccaagcttataaagccgtggccgaagcaataggcagccaagcggttattatacgtacgatggatatcggtggtgataaaaatctgccctatatgaatctaccgaaagaagagaatccattccttggttggcgtgcaattcgtatttgccttgatcgaaaagagatcttacattctcagttacgtgctatcttacgtgcatctgctttcggtaaattacgtattatgtttccaatgattatttctgtagaagaagtacaagagctgaaagtagaacttgaattgctgaaaggccagcttcgcgaagaaggtaaaaaattcgatgaagcaatcgaagtgggagtgatgatagaaacaccagcttcagcagttattgctcatcacctggcaaaagaagttgactttttcagtattgggacaaacgatctaactcagtatactctagctgtagaccgcggtaacgagttgatttctcatctttataacccgatgctaccagcagtattgagcctgattaagcaaaccatcgatgcttcacacgctgaaggtaaatggacggggatgtgtggcgagcttgcaggtgatgaacgtgctaccttgttgctattaggcatggggctggatgagtttagtatgagtgcgatttctattccccgcatcaagaaaatcattcgtaatacgcgttacgaagatgcaaaagcgctagctgagcaagccctttctcagtctaccgctaaggggttgatagcattggttgataccttcatcaaagaaaaaacactttgctaacaatatcggttaaaacgcggtccagtataaacaattaggagaagattcatgggtctgtttgataaactgaaatctctagtttcagatgataaaaaaaacagcggcactattgaaattatcgcacctttatctggtgagattgtcaatattgaagatgttccagatgttgtcttcgccgagaaaattgtcggcgacggtatcgctataaaacctgccggcaacaagatagttgcaccagttgatggaaccatcggcaaaatatttgaaaccaaccatgcattttctatcgaatcggacagcggtattgagctatttgtccattttggtattgatacggttgagcttaaaggtgaaggctttaaacgtattgctgaagaaggtcagcgtgtacaaaaaggtgatttagttttggaattcgatcttaaattccttgaagagagagcaaaatcgaccctgacacctgttgttatttccaacatggatgaaattaaagagttatccaagttgagtggttctgtcactgttggtgaaacacccattatgcgtattaaaaagtagcaacattttaactgttacaattccattttcatattaaaaaacggccgacaatcacggctgtttttttatcccttatattcaattaatatcgttttctatttatacccgttatccttcaagttgcctctttgttggctgcactcactcaccccggtcacatagttgcctatgcttccggggattcactcccttgccgtcgcgatgcagtcttgaaatccatagggtataaatatataacctgattaattaaatactccggtagaaagatatctatcaccacgatcgcaaataatggtaacaataacagaacctggattttgtgctgcaatacttaatgctccagcaacagcaccgccggaactaactccacagaaaatcccttctttctgagctaataaacgcatggtatcttcagcttctttctgagtgatatccagcacttgatcaactagctccttgcggaaaatgccaggcaaataagccggcgaccaacggcgaataccgggaatatggctattctccgccggttgtaagccaataatctgtacacgattagactggctttttaaatagcggctaacaccggtaatggttcccgtcgttcccatactggaaacaaaatgtgtaatacgcccttgcgtctgctgccaaatttccggccctgtcgtcgtaaaatgcgctaaaggattatctgggttattgaattgatcaagaactttaccttcaccattacgctccatttgctgagctaaatcacgtgcaccttccatgcccattgctctactcactaaaatcagttctgcaccataagctcgcatagaagcctgacgctcaaggctcatattatcaggcatcagtaatttaaggtgataacctttcactgcggcaatcattgctaacgcaatacccgtatttccgctagtggcttcaattaatacgtcaccgggagaaatttcaccgcgcaattcagcttgctgaatcattgatagcgctgttctgtcctttatcgagcctgccggattattaccttcaagcttcacccatatttccccccctagcttatcggtgattcgttgtaattttaccagcggggtgttacctataaaatgttccaagcttgccacagctattacccaaattttatttaatagaaaagcgaaataaccatattcaggaatatatcgcaagactttaaataaaaaatgcccatccctgacggtaaggagatgagcaaaatggtaccaaccaaatctaaataattatcaggccgtttgggctaaacttagtgtttgcaattgtttatcacccgcatataaacgcgcctcagtgccaccaataaaataacgatttcctcttgtgggtactgaagtttcatcaaaccaaacaacagcaaccgattcatgatgccagcctaggggctgaaccgaaagctgccagaaatgccctctaggactgacctcggtcacctgtaccggcaatggactggaaagtgtcggttgcgagttcatcatgatatcccacggacgcaagaatacatcaacattcccctgatggattggcgtcacattgagaggcaagtgctgtccgccaatcaacaactgagagcctttaatttctccactaaaatgattgacctcacccaagaactccatcacaaaacggcttgccggataacgccatacctcttgtggcgtacctacctgttcaatattcccttgtctcataacaacaacccggtcagccacttccatcgcttcttcctgatcgtgagtgacaaagacgctggtaaatttaagctcttcatggagctggcgtagccaacggcgtaactccattcttacctgagcatccagtgcaccaaatggctcatcgagtaatagaatttgtggttcaacagccaatgctcttgccaacgccacccgctgtttttgtccaccagaaagttgcgatggataacgttcagcaaaatgcgtcaattgcaccatttccagcaactccatcaccttacggcggatagccgccatattcggacgcctacgtcgtggcagtactgtcaatccaaaagcaacattatcaaacacggtcatatgccgaaacagtgcataatgctgaaatacgaatccaacttgccgatctttagcatgcatacggctaacatcttgcccatggaaactcaacttccccgcggtttgttgttccagaccagcaataatcctcaacaaggttgttttaccggagcctgacggaccaagcagagcaaccatttctccagaaaaaacattcagagtgatatcgctcagaacctgagtccgaccaaaatatttactaatattgttaatttcaatactcatattctgctcctaccttaaccatgttggcgacttaaccgccactgcaaagcacttttaacaatcaaagtgataattgccatcaatgctaacaatgccgccgcagtaaatgcccctacggtgttgtaatcttgatgcagtaattcaacctgcaacggcaatgtgtaagtttcaccacgaatagcaccggataccactgagacagcaccaaattcaccaattgcccgggcattggtcaaaaccacgccatataacaacgcccaacggatattaggtaatgtcacccgccaaaacattttccaaccagatgcccccaataaaattgcagcttcatcctcctgactcccctgactaagcatcatcggcaccagctctcgaacaacgaaaggacaagtcacaaatatcgttactaaggccatccccggccaagaaaacatcaattggatatcatagggttccagcaaacttccggcccagccattcgaaccataaaacaataggtagatcaaaccagctacgaccggcgaaacagcaaacggaatgtcgattaatgtcaataaacattgccgccctggaaactgaaagcgcgttaccagccaagcaatcatgacgccaaaaattaggtttaccgggacggtaattaacgcgatcagtatcgttaaccagatggcatgcaacatatcaggatctaaaagattctcagtgactatctcaacgcctttagaaaaggcagtcataaatatccagacaatcgggatcactaacagtaagattgaaaacaatacgcctgttatgatcaacgtccatttcgcccaatttacaggtggtcgttgcgctacataagattcagataattcaaccattaatgccctccaatccgcctaccaaagcggctttgcagagtattaatgctaaatagtaatatcagggatattgccaatataactgatgcgatagcactggctgcggggtaatcaaactcctgtaagcggataaaaatcatcagcgataccacttctgtctgccatgcaatgttaccggcaataaagatcactgcaccaaactcccccaggctgcgggtaaaagagagtgcggtgccggcaattaaagccggagataattctggcaatacaacccgccagaaagtttgccaacgattagcgcctaatgtttgagctgcttcttcatattctggccctagctcttcaagtaccggctgaatcgttcgcactacaaatggcagacttgtaaacgccatcgctaccgcaatacccaaccaagtatttactactttcacatcaaagtgcccaagcaaagagccataccaaccactcacagagaatagcgttgccaatgtcaatcccgctaccgcagtaggtaacgcaaaagggagatccatcaaaccatccaataagctacggcctgggaaacgatagcgggttaaaacccatgccatcaacataccaaacaccgcattaaacaagctggcaaccgctgctgctagcaatgtcactttataagctgctacaacttggggattagcaatcacctgccaatactgttcccaagtcatactggaaagctgcacaactaatgcactcaggggtaacaataaaatcaaacaggtatagaacaaactactgcctaaactcaacccaaaaccaggcaatactcgcttactggatctcgaaaacattacttatgcccctcggccagcaattggtccagtataccgccagtattaaagtgagttttcatcacttgtggccaactaccaaattgatcttccaatcgaaacagcttagttgctggaaaacgggctctctgttgattcatcacgtttttattactgacacgataattaaaactggtaatgatctgctgtgcttgtgggctataaagataattcagataagctttagccgctttctctgtaccgtttttcgcaatatgcttatcaatccaagccacagggaattccgccagaatacctaccggtggaacgagcacttcatatttatcctcaccatactgcttgcgaatgttgttcacttcagattcgaaactgatcagtacatcgcccaaaccacgctcaataaatgacgttgttgccccgcgaccaccagtatcaaacacagcaacatttttcaggaaacgttgcatccattcgcgagttttaccctgatctccaccattttcctgttgaataaccccccaagcggccaaataagcataacggccattaccggaggttttagggtttggcaagactaatttgacatcctgacgcactaaatcatcccaattacgaatatttttggggttacctttacgcacgagaaacgccatcgtggaatagtaaggtgaactgctatttggcaggcggttctgccaatcagccgagatcagattgccacgatcatgcaaaatttgcacatccgttacctgattgtaagtcaccacatcagcccgcaatccttgaagaattgccagtgcttgtttggaggagccagcgtgggattgtttgattatcaacttatcttgtggatactgctcattccactgtttttcaaattcaggattcaatgcagaaaataactcacgcgcaacatcataagagctgtttaatagctctacagcaaaggcatgactgctgcctaataaagttactactaccagtccgtttagtatcgtattttttattgaatactttttcattttccaccttatccgttatttcatcaaataacgcgccagtgactaatgtatccagtttatttataacagggtagataactatcgccgtttaatataccaaattgcacttagaaagtatgaaacgcaataagatgacaggaatatatccgtcatctttcaagttgcctctttgttggctgcactcactcaccccggtcacatcgttatctatgctcccggggattcgctcccttgccgtcgcgatgcatcttgaaatctattgggtataataaggtttttaaatgagaaatgcgggcctgttacggctccgcaagaggaacatcaaattcaccaaacccactcagtttatgtttttaatcagatatttttatcgcttccaaatgatacgttccactttccagtttttcagtacatcatcagaaggaatcaagccttcagggccattccaattacctgtaaacagataactgacatgtttgctctgtggggatacgcagacaatcgcgctcttctctgattcactcaccgcatttcggcaaacatcaaatgctttgctataaagtgccgaaaatggcatgccgacctttgttccccagacggttttaatatcttcatccaacacttcaatgcgattgacttttccatcagcctgaccaaataacgctatcttcaattgatcactatccattgcttgaaatactgtcaccaattggccattttttgtttccataccactgcgtaagtggtactttccatccaaccccttttctattgcctcttcattcattgctgtcagagcatttatttcccccaccccctgatctgagatttttaaggggctaccaaaccagctaataggagacaaatccgaccatgaaaaacccgatgaccccgtacaaccggccagcaacaatgcaccacttattatgaaaaaacgcaatcctgacaacatgttagttaaagtatacttctgcataacgggttcccttatgactcaatacagagataggcactgagacatcacatctgattgttagtttcagagaatatttaaattaattactttagattaatattttattgataaaatacaacttagcggtatcattacccccccataaaagtcattactattgataaggtcaatatgatgaaaaaaatatttataaccactgctttgattactttgttcagtatgccgtcaatggctcaagcctcacaaacgcaatttggtggtttttctggtcccgattcaacacagcctccggtccaagcagtaccacaaggtggttttatcgatcaaaatgcgagagtttccaccacccaacaagttaaaaatatgagagacgacagttgggtcgtgctggaagggcatattgaatcccgtatccacagtgatcacttcatattccgcgataatgccggaattgttgaagttgaagttgatcataaatactggaatggtcaaacgataacgcctcaagatagagtccgccttgaaggtgaagtcgataaagagtggaatggtatgactgttgatgtgaaaaaagtcaccaaattgaactaatgcttgcggctgagtggaattctttcactcagccatatctatacccgtcatctttcaagttgcctctttgttggcttcactcccttgccgtcgcgagccatcttgaaatccatagggtagaaactcaatattcctgatcaacaatcaaacgcttactgaaaataacgctctcttgatgacgatcttcatattccagtttttcacacatatagatagtggcatcattatcttcaggaacaataagaactatttttgggcaaccacgagcaatcaatttcttctccaaccgggcaattaatgcattcgcaattcccctaccgcgaaattcaggatgaactcctaaataataagctgaaccacgatgaccatcataaccacccataatcgtcccaaccacttcaccaaccacttccgcaactaaaaacaggtcaggatcatgcgtcaatttacgctcgatatccacttcagggtcaacaccaggattaagtaaatcgcagcgttcccataaggtgatcacttcttcaaaatcatcttgtcgaaatacccgaatttccatccctaaccaacctgtttttattgaaataactattttctcattatctccgctttaacaccggaatcaatacgaaaatgcgttctcttccactaatagctataatatagcgctcaccacaccataatgggaaaagaaccatgaatacaccaaacattaatcagattaaatcttttttcctttcattacaggatgaaatttgccaacaactggaacaaatagatggtaaagagaaatttactgagcagtgctggcaacgagaagaaggtggcggaggccgtagtcgaattatgaaagaaggcacgatatttgaacaagcaggcgctaatttttctcatgtatcaggagatatgcttcctttatcagcaacagctcaccgccctgaactggttggtcgtcattatcaggcgatgggcgtctccctcgttattcatcctttgaatccctatataccgaccagccatgctaatgttaggttctttattgcagaaaaagaaggtgaagcgccagtatggtggttcggtgggggttttgatttaacaccttattatggttttaaggaagatgctattcattggcacaccactgccagaaatatatgtcgaccctatggagaagatgtttacccaaaatataaagaatggtgtgataattatttctatattaaacatcgtaacgaagcccgcggaattggtggcttattctatgacgacttaaatacacctgactttgaacattgttttaattttactcaagatataggtaaagggttcctttctgcctatctacctattgtggaaaaaagaaaggagatattatggggtgaacgtgaacggcaatttcaattatatcgccgtggtcgctatgtagaatttaacctcgtttgggacagaggaactttatttggattacaaagtgggggacgaacagaatctatcttaatgtccatgccaccattagctcgctgggaacatgattatcaccctgaacccgaatctgcggaagccgctttatataccgactttctacccgcaaaaaactggatatgattttccatcatgttaggaatattataaaaaactattcctaactatttatatttttattacagccaatgcaagaatccctcacataaaaaaacttaacaacttgttaacaaacccttaacataaaagaagcaggttggccctgatgactatctgctggaaacatgtttaatatgaatccgtacttaaagagtacctctaattaaaactaaaaatttattccaggagatattttatgcaaatacaaaacaataactacagaggcttaataccgccgtacattcttcaaaatatttataataatgacaataaaaagaagaaagtattaatgacattaaatcatactaagagtttaatgttggacactgttattaacgaatcatccgatgattccgacgatgatgataaagttaccaaaacaactatacatcgttctattcacgatgcagaaaataaacgcaagttgccaggaaaattagtacgagatgaaggagacccagataacggagataaatcagttgataacgcatatagatatttagaagcaacttacaatttctataaagaagttttcaaccgcaattcattagatgataaaggaatgaaattgattgccaccgtgcattatggcgaagaatatatgaatgcattctggggcaacggacaaatggtatttggcgacggagatggcaaaacctttaatgatttcacaacctctgtcgatgtgatcggccatgaattatcacatggtgttattgaaaaaaccgcagatttggtctatttcttccagtctggcgcgttgaatgaatcaatagcggatgtttttggtacattagtaaaacaacattatctgaaacaaaaagctgaagaagctgattggattataggtagtgaattactgggcaaagacgttaaaggcgtagggattcgttcaatgaaaaacccaggcagtgcatatgatgataaggagctcggtaaagatccacagcctggtcatatggatgattataaagacttgccgatttatagagacaatggtggagttcatattaattcgggtattcctaataaagccttctataatctggcgataaaattaggtggatatgcctgggaaagagcaggaaaaatatggtacaacaccttgttggataaagatcttgcacgtgatactaacttcgtatccttcgctaaattaacaattaaacatgctcgtgagttatttgatgaagatgttgaaaaagcaacgattgatagctggacagaagtgggcgttaaagtgaaggaagataaagacgataaggacaaaaataaagataaaactgaagagtaatctataaccatatcgctggtgtaacgccagcgatattttattatttgtaatacctgactagtaaaaaaatatatctcatagaagatgctaaaattgttaacgccgaatttcacgctatactaaagagacctgaaaaataaccgtaaaaaattggtatatcatgaataataaaacgctcaaactcacaactgatagtaaaatcacaatttccctacaaggaggatttgccgctacacctggccttaaccaagataagacagtgaatttagaatcattatcttcacaccaacaacagttatttcttcaagccatagagcaagacttttccgattctatgccatcagcaccatatcctgataaagattattatctgctcagtatcgtcaatggaaatgaagaataccacttcacccttcctgagtcagatgcaccggaaatcattactcagatatggaacaccgacaaaaagggtggttaatcaccaccccttttcctattagcattaacgctttttcagatgcgccatcagacgtttacgtttacgcatttgatttggtgtcaacgtattacgtttgtcagcatagggattcgccccttctttaaattgaatccgaatgggcgtccccatcacttttagggatcggcggaaatagttcatcagataacgcttataagaatcaggcaaatcggttacctgattaccgtggatcacaacaattggcggattataaccaccagcatgagcatatttcattttcaccctgcgaccacggatcatcggcggttgatgatcttcttcggccatatgcatgatacgagttagcagtgaagtattgacacgacgagtggcgcaatcataagcctcaagaatcgagtcaaacagatttcccaccccactaccatgtagagcagagataaaatgtactctggcaaagtcaacaaaaccaagacgataatccagcatctctttcacacgctctttatcttcctgtgacataccatcccatttattgaccgcaataaccaatgagcgcccgctattaagaataaaacccaataatgacaaatcttgatcggaaatgccttctcgcgcatcgatcaccagcaatacaacgttagcatcttcaatcgcttgaagggttttgatgactgaaaatttttcaactgtttcagtgatcttaccccgcttacgtacccccgcggtatcaataaggatatattcacggccatcccgctccattggaatataaatactgtcacgggtagtgcctggcatatcgtaaaccacaaccctttcttcacccaagatacggttagtcaacgtagacttgcccacatttggcttaccgacaatggctagtttcaatggcagagttgatggatcaaaatcctcctcctcttctaccatctcaatttcattctgttcctgctctgcccaataagctgcgttggcctcttcctcagtcaactcaaccacttcttcttcacctttgccggaaaaaggcaacagtactcgttcgataagttgagtgacaccacgaccatgagaagccgcgatagaatagatatcccccaatccaagggaataaaattcagcaatagcggtatcaatatcaacaccgtcagttttattcgcgaccaaaaaagtagctttttcacgaccacgtagatgttttgctatcgcgtggtctgctggcatgagcccggcacgagcatctaccataaacagaacaatatcggcctcttcaatcgccaacaaagattgagctgccatatgggtttccacaccatcttcagtgccatcgataccaccggtatcaatgatgataaactcctgcccttcaacctcagctcgaccatatttacggtcgcgagtcagacctggaaaatccgctaccagcgcatctcttgtacgggttaaacggttaaataatgtggacttacccacatttgggcgccctaccagagcgacgacaggtatcatttgttgatgcctcatgacttaatttgaaattagtattccgctgttcatctagtgttaatcacaacagagcactaaaaagacgaaacggctcctgttctctccaggagccgtaggactataactatacccgttatctttcaagttgcctctttgttggctgcactccctcaccccggtcacatagttcgctatgctcccggggattcgctcccttgccgtcgcgatgcatcttgaaatccatagggtataacgctttactttatttccggtaaacaggcagtaagcaaaactcaacgcgtaaacagataaaccgtaccgtctttcgcctgtaccatcaatttatcactggcaacaaccggacgactcattaaaccggagctatcaactttatgttgggcaacaaacttaccgtcatccatattcagccagtgcagataaccttcactgtcaccgacaaccagatagccattatacatttcaggcgcggttaaattacggtgttgcaattttgtctgagtccacaaagtgacaccatcactttgacgcagacccataacacgatcgttttggtcaacaatatagatattatcaccataaacaaccatctcgttcactgaacccaaatcgcgcttccagaggatctgacctgaacgcatatcaagcgccaccagattaccgttataagctattgcatatatcacgccatcagaaataaccggtgtcgtatcaacatcattaagacgaccgatttctgtagaactggttacctgagaaatacgttgttgccaaatcaactgcccttgagaaatcaagacggcgttgacacgaccattatccccacccacgatggcagcaccgtaagccgcggcaggtgccgattcaccacgcaatgataatgatggtgtatccaaattaacggaccactgcactttaccatctgactcgtttaatgcctgcaacatcccattactggtatgaatcagcaccagaccatcactcaccacaggacgcgacaatgcttcaccggcaacgtcggattgccaggcaacttggccgtctttggtattcaatgcaataactttggcacgttcagtacctacatatagatgatccccagcaacggtcagaccaccagagagcaatgcaggtatacgagaagagaggaaacccgctttttccgccagattcaccgaccatatctctttaccactatcaatgtccaacgccttaacgatgccatgacgatcagcaacataaacagcggagccctgccaggttggcgtcaagtgagaataataacggcctacaccatcaccgacagatttatcccaaacttcgcttggattaaattgattttcgacctgtggcaatggtgacatcgttactgtatcttgctccgttgaacaaccggctagcagaacggaagccaccaaaccaaccaagagtgttttacgcagttgcattgaaagaattccccttagctggataagttattcaatttaagatttaacatcgatttgatcgcctgtggtgaatttgagctcaaacctttggtatacgctgcgcgggcaccagcaatatcaccttttttcaccagtgcatcaccgcgaatatcctctgcaacgccaacccaaccggaacctttgacctgttccaatgttttcagcgcagcatccgctttatcttccgccaattgaaccctggctaggcgaatattcaccagagcctgcaaatcctcattttttacctggccggtagccgcagataaaaactgatctgctttagttaattcattcttttcaacagcaagttgagccaaatgcatatgcgccatcacgccataactgttattggtttcactggcaaatttttcggcagcagtatgactctcttttgtactggtaattaatcctcgatctactcgttcaaaagcttctgcactttcctgcaactgatttgtctgatgagattgccagtaacgccagccaatcagcgccccggcccccaacaccagccctaaaaccaaggctttaccattattggcaaaaaagcgacgaatcacgtctacttgttcgttttcattggtatagacttccacagagtctctccttaacttaacagttcaaccaaacgagctgcaatttcgctttgcggcaacgtttgttgctcacctgtacgtaaatctttaatggctacttgaccagaacgaacttcatcctcaccgagaatcaatgcaattttggcgccttgtttatccgcacgccccagttgcttcttaaagttccctccgccgtggttcatcattaaacgcaattggggcaacgtatcacgtacttgttcagccaaaatcaatgccgcttgctgactaccttcaccaaaagaagcgagataaacatctgcaactgtccgctccgcaacaaatgctggattaatttcttgcaccagcaaaatcagacgctccatccccatggcaaaacccacagcaggcgttggtcgaccccccagttgctcaaccaacccatcgtaccgaccaccggcacagaccgtcccttgagccccgagtgccgttgtcacccattcaaatactgtgcggttataataatccagaccacgaaccaaacgctgattaatccgatatttgatacctgccccatcaagaagtgcacacaggccatcaaaatgttcctttgattcggcatcaagataatcacacagttccggtgcatcgttaagaagttgctgaacctctggattttttgaatccagaacacgtaatggattgctgtacatacggcgtttgcaatcttcatccagcttatcttggtgctgttcaagaaaagccaccaacgcttcgcggtaattagcgcgtgccgccaacgaaccaatggaattcagttcaagcgtcacatgctcaaaaataccgagctcacgccaccagcgagcagtcaataaaataagttcggcatcaatatcaggcccctgaagaccaaaaacttcagcacctaactgataaaattggcgataacggcctttttgtggacgctcataacggaacattggccctaaataccatacgcgctgttcctgattgtacagcagaccatgttcaataccggcacgcacacaacctgcggtattttcagggcgtagggtcacactttcaccattgcgatcatcaaaggtatacatctccttttcaaccacatcagtgacttccccaatagcccgtctaaataacggggtctgctctacaatcggtgtgcggatctcactataaccataacccgccagtactcgtttcaaaatagtttcgatacgctgccagataaccgtatctgccggcaagtagtcattcatgcctcgaatagcttggatattttttgccacgttttatctctagttaatgattcaaaaatgatattgcattgaagcgaatatcgacgagcttcaattaacaaacaaaacaacgctggctcatcatcacgataagccagtatcagatacattatttgtccagttgacttatgccaatgcgcttattttcatcgagcattgatgctttagcacggatcttagcctcaagctgatcgatcatatcagcattatcgagacgcactttctgccgtatcccatcttcataaaaaccacttttggttctggcaccggtgacacccagagtagaaacctccgcctcgccgggcccgttaaccacacaaccgataatagaaacatccatcggtgtgagtaaatcttctaaacgctgttctaaggcattcactgtgccaataacatcaaattcctgacgggaacaggttggacaagcgataaaatttataccacgggaacgaatacgtaatgctttcagaatgtcaaaacccactttaacttcttcgaccggatcggccgccaaagaaatacgtagggtatcaccgataccttccgacaggaggatacccaagccaatggcagattttacagagcctgcacgagcgccaccggcctcagtaataccaagatgcaatggctgctcaatctcttgggccaataaacggtaagcgccaaccgccagaaagacatccgacgcttttacactgattttaaactgatcgaaattaagcctgttaagaatatccacatggcgcatagccgattccagcaatgcttccggggttggctcaccatatttttcctgaatgtccttttccagtgatccgccatttacaccaatgcggattgggatatttttatcgcgggcagccgccacaacctcacggatacgcgcttcattaccgatattaccagggttaatccgcagacaatcgacaccatactctgcaactttaagtgcgatacggtaatcaaaatgaatatctgcaactaaaggaacattagcttgctgcttaatcaatttaaatgcttcggctgcgtccatcgttggtattgatacacggacaatatcaacgccaacacgctcaagcgatttaatctgtttaacagtcgcttccacatctgtagtacgtgtgtttgtcattgactgcaccgcaatgggcgcaccatccccgacgggcacattgcctacataaatacgcgtagatttgcgtctttttatcggcgattcattatgcatactgatgtttctcccatacttccatgtgtttactgataaaactacaactctatgccctactgcaacaggccttttattgtgctgtcggtaccttaagacgcgcgatacgactctctttaataaagcggcttaaatcgacaacttgcccccggaactgtacatccacaacagccggagcaccgatagttaactcataaggtaatgagccagagagactcagatggtcacccttatgtttagttccactaaatagtttttttccatttgcatcaacaacttgcaaccaacaagatgctttaaaattcatcatcaacttattactgtcagcgactgtcgttgaattattttcagacacactcggcacttgagctgtcccttgattagctgacaacggagcagtctgagcctgtggcccgttaccagctaattgagtttcaggtgttttcaccgcttgattttgcgttgatgccacagattgagccacttcctgatgatgactactggtattattcgcggccacggcattttcagctatattttcagcgacagctacagagggtgatggctcacttgttgcctgctcgcgggttggtaactgtgtcacctgatcgtgattttcagtgggtaaatcctctgagctggcttttttctgagcaattttagccgcggaatgatcagccatcgaaatcagttccttctgttgggctatgtggttttgccaccaccatgctcccgtcaaactaattacgactaaaataatcaaccacgtaatccacatcaaccaactttcgcgttttttacgttttttacccaacgaaaaactctgcatcggtgaaactttcgctgtttttgccggggtatgcttatccagaattgccagaatttctgcttctggaatttgtaccaacttagcataagagcgaacataaccacgcaggaaagtcggtaccatagtggctggaatattgtcctcttcaatatcacggatagtagaaagttttaaacacaagcgatcagctacagtctgctgggttagcccgtgttgttcacgagcctgacgcaggagctgacctgcggttaaataagcttgttctggagtcgtttcagtattcattagcaagaagacgcggtactgttcaggttgtgaaaaacttcgcgccggcaccttgctataatctttaaattacacaatggcctgcgcggcgaaatagatttgctattttactagcggcaaatcactgataacaaacacgcctgtcagcatagctcccagtaaacagagtcttgacttcttcatactgcccctgctcacagagaaaaacgctgtaatgatacaataccgtatcatttcctggcgcgtactgcatcgccattttgtaacgttgacgagcggcttccggttgaccagaatattgctcatacaacgccatacctaattgagcctgataatggtctggctttgccagtaaaaccttatcaaagtgatatctggcggcaggtaaattacctttagccagataggccattcccagttgaatccgggtttctgctgcgacttttcgctgttgattgccatttgttggttgattggcacatcctgccaacaacataacagccaccacggcaacaaccatcattcccgataacgatttccttatcattccatccccaccgaccaaagatatgccattgtaacgatcatttcacttatgtatttcaattactgcatggcaggacataccaacattcccattcagactgatcttatctgaataggttcaccggcctgacgttttttcaatgtacgtttggtacgatcaatgacatcaccggcaagctgaccacatgcagcatcgatatcatcaccgcgcgtcttgcggacaatcgtggtgaaaccatattccatcagcaccttagcaaagcgatcaatccggctgttggaactacggccatatggtgcccccggaaatgggttccacgggatcagattgatcttactcggcgtctctttcaagcattcagctaattgatgtgcctgttccacgctgtcattaatatgatccagcatgacatattccacggttacacgcccctgattagcattagatttagtcaaatagcggcgcacaccggcaagaaactgctcgatattatatttacggttgataggaacgatgtcatcccgtacatcatctgttggtgcatgcagggaaatggccaaagcaacatcaatcatatcgccaagtttatccagtgctggcacgacaccggatgtggataacgtcacacggcgctttgacaaaccgaaaccaaaatcatccatcatgatttccatcgcaggcaccacgttatttaggttaagcagcggttctcccatccccatcatcaccacattggtaatcgggcgacggccactggatttcagtgaaccaataatttttgcggcacgccaaacttgaccaataatttcagaaacccgcaaattacggttaaacccttgctgagcagtggaacagaatttacactccagtgcacaacctacctgagaagagacacacaaggttgcgcgatcatcttccgggatataaaccgtttcaacctgctgatcgccaacagtgatcgcccatttaatcgtaccatcggccgaacgttgctcttctgctacttcaggtgcgcggatctctgcaacttgctgcaattttgctcgcagaattttgttaatatctgtcatctgctcaaaatcgtcataacagtagtgatatatccatttcatcacttgatcagcacggaagggtttttctcccatgtcaatgaaaaactggcgcatttgcttgcgattcagatcaagcaggttaattttaccgcctttcttttctggagtttcagacacgacagaagcagcaaattgtgccgcagtatttggttgggacatctttttatatcgcctcgttgtaacactttcggctctgcgttaatgaactcaacgcgaagtttcaattcaggtcactatcagtttagtatagtaacaaataataagcgccccgttgaattaacaacggggcgccgcattgtacaaactttaatgcaatgatgctacgggtaacggcaaatcaattaacgtgggcaaatttcatcttctgtgaagaaataagcaatttcacggtttgcagattccaccgcatcagagccgtgaaccgcgttttcagtgaagctatccgcgtaatcggcgcgcagagtacctgctaatgcattatcaggattagttgcccccatcaggtcacggtgacgctgcactgcattctcaccttccaatacctgaaccacaatcggaccagaagtcataaattccaccaaaccatcaaaaaaaggacggcctttgtgctccgcatagaaaccctcagcctgttcacgggtcaggtgaagcattttggcggcaataattttaaacccggcgctttcaaaacgagcataaatcgccccaatggcatttttcttcaccgcgttaggcttaataatagaaaaagtacgttcaaccgtcatggataacctcttggttcttctgtcagcaactgataattttaatttttcccgataagttaatcggttaatacttcattccgccaccttagcggagataaaaacggcgttgattataggggtacgaatagcggttgcctacagaaaacataacattccattaaattttccttagcgaaaattaccattttttcgtacaaatcacacttttacctgaatcgtttacttcaaggtaaaattgacagcatcaacctgtccacccaaatccaaaacactaagctgatatttacccggttgagttaaagtctgaacaaatccctgattattttcggtggtcattacctgttctccattcagaaaccaccattgctgcccaccactaccgccctgagtggtaacacgtaaatcaaggctgccaaaaccgggaagccgtttcaatacatctccgttatgaatacccacgatcaacaaaggtgcttcatctgatttcaacggtgggcactcagggttaaccggtggcaaacgctgcgcccgtcgctcttgtgccggtaaccatgattcgagggtaatcggccacaaagcgatatttttagcctgagcaccgggacaatcaggagccacgcgcaaaccatgcttatccaaccacacctgttcattagtgcctgaaatagcctcttgccctaccgcaggcagcgtaggcggaatagtgttattcagtatccagctcagacgccgctgacggcaattattctcttccttcggtaaactctgccctcccggccaacagatgattgcccgactgacacttgctggacgcggatcaaccggaatccgtttagtcccatttcgcatattgacgaataacagattattgacctgattcatgatgggaatcgccgtagcatagccgaactgcccgacaaccggcgtgccatccggcctgccaacccaaacaccgatggtataacgcgcacttaagccaatagcccaagcatcacggtagccatagctggtaccggttttccaagccaacggcacttgtgccggtaacacatcatcaggttgcggcagagcttctccagccataatccgcctgactatccatgccgcgccgggggaaaaaagctgccgatcacgcaatttctgctgcggagtgaatctcaaaggggaaaccctcccctgacgggcaaacgccgtgtaagccgccaccagttgatccatccgggttgccgtgccaccaagaatcaatgataaattgggttcactgccgggaggaaaacgcaatacggttcccacattacgcatgttggcggtaaaccgcttggcaccataggcttcaagcagttgcacggcgggcaaattcagtgaacgaaccaacgcctcactggcactgaccggcccatgaaagccactgtcaaaatttcccgggcgataataatcaaagcggcgaggcacatcctgtaacagtgattccccatgaatcaacccatcatccagcgccattgcatacaaaaatggtttcagagttgatcccggcgaacgccatgaacttatcatatcgacatgaccaaaacggctatcatcccgtagatccagcgaaccgatataggcttttaccgccatgtctgtatgatcaaccactaacacgccaatcgacgttttttctggtaactggtactgccaattcaccgccatatcttcaagctgacgctgtaatcccacatccaaggttgttttaatgatctcctgacgaatgcctttcgccattcttctggcaagcaaaggagcaagctgtggcacctgccggggagccaaccacaacgtttcttgccgaatatcagcaatcgtctgttccgaccagattttatagtgcgccaaccgttgcaacaccttatcacgagcagcctgtgcccgttcaggatagcgatctggccttaaacgactaggggcctgtggcaaaacagccagtaaagccgcttctcccgccgaaagctcagagggcggtttagccaaatatgcccaactcgccgcaccgacaccttgtaatgtgcctccaaacggcgcacgattcagatacatttccagaatttcatctttagaatagtgccattcaagctgcaaagtacgccagatctgcttcaacttcccgcctaaagtgcgtgaatgggggtcaatcaaccgggctacctgcattgacagcgtactaccgccggacaaaattttacctgccagaatatcctgccaggcagccctgaccagagaaatcgggttaatccccggatgctggtagaaccaacgatcttcataagtcagcaaagcctgaatatattccggcgacacttgacccaacgtcaccggataacgccaaacaccttcatcatcggcaaaacgccaaagtggcgtaccatcctcactcacgacaatacgcgccattttgacttcacgcagtggcagaggccagattttatctgccagccataaacccgccggaaacaaaaacaacaacagtacaatcagccacataaggcgatacggtttcttcattaatgaacacctggagagaaaccagcccttacaccggagcataagggctgacaaatttagcggacaacttccagtttttcaggtgtagaacccactgcacgccagtaaggcacatacatagattccacctgtggtgcaggaatggtgtagacgcctggcgtcacggcgcgagccagatagagcaacgtcactggctgagacggatcaaccgcgactgccgccacatatcgatcatcacgatattcaatatgatgaatcgtcgcctgttgcatatcgccaatcaactcctgaagattagcggcactctcactcaacttggcactgctgttagccaagttctggttttccagctccaaaccagcgggcaataaatcaacaaccaaagcatcctgtacgggtttatctgagctcaccaccagcttcacaaccaccatatcaccgctattcagaagatcactggcaatcggattacccttcatatccaaatagctacgctgaattttcagcacattagcataaggcttcggagagcgcagcgggtaggccaccacattcactcgtgaatagagcgtgctgtcaccaaggttactgaaactcacaccttgctgaatatcctgtggatacagcatctcactataggacttatccctacttattggtaaagtccgctgattaatcaccgctttccacggttgcaccgacgcatcgataaagaaacgccccgccagatagagtgaattactctcctgagttgagaaataattgcgggatgtcaattcatcagacagcgccagcaatttctcatcacgttcctttatttgcatgttattttcagtcaacagagcaacaatcatggcgttgtcacggatggcactgccgtaatcacctaactctaaatcgtcatgacggtttttactgatccccaaacgaaccgcttcatctgctcgggtgttatcccccatcagtttcagtgcaacacccagttgtaccagtgacaagccattacctgcttgctgacggcgttcataaacttgtctcagagcgcccaatggtgctttctgttgattggcaagcaccagaccagcataagactgaaccgagaatcgcattgcgtcctgattctggctgtagggatagttaataacactcttatcctgtaaataacgtaacagacggttattggcagaagtcagtacctctttaggtacgctgtaacctcgttgacttgcacggaatagaaaatcggtggcataggcggttaaccaatactcttcatcaccggttttatcccataaagcaaagctaccgtcatgacgctgcatactcaacagatgaataattccctcatcaatactcgcccggcgtttattatcatcttccgctctgatacccaaactattcagctctgatttgttcgaatagagtgacggataaagcccactgattgtctgttcaagacagccatatggataggcgtacaattcacgaatatagcgtgaaatctgtaacggtggacggctgctcagtaacaactgcccctcggcgccttctggcgataaacccgataaagcatttaacggcaactgccactcctctcccggatgaataacattagcgaacagaaccgtttccgctggctgtgccggacgcacaccaatctgccaactatttttatacggtttcagattttcaccgggtaaattcagaccatcaaccgtcaaggaaacctctccttgaccaaaccccaaatccgctgtgaccggaatctctactgtggtgcgtttgcccttttccaatgttatctctttactaacatccccctctaacttaatcaggtcattagccgcaaagttcaaggtcaagttttgcgtctgttcagtcaagttagtcaaatccaacgacaacaatgcgctatcaccaccggccataaagcgaggtagtgccatctgtgcaaccaccggcgcagcaacgacaactttattttcaccgtggccgaactcatcttcactccacgcttgagccatcaacctcaattcaccattgaaatcggggattggcaaaacgatctgcccttcgccattttcatccagcgtcactggctgagcttgttcagcgataatcttaacttcggttaatggctttctgccgccacgatcaagggcgctatcatcaccatcaccgccaaaacgcagattcgccagacggccttcaccttcaatcaactgaccatacacatcatattgatcgacactgtaacgcttacgaccaaagaaagcctcataggggtccggcgttttaaaattcgtgacattcagcacccccatatcgacagcagaaagcagaacattaacctgcttgggtaacttccgcccttgctgtggtgtcgccttgactttaacagtcaagttctgattcggacgcattttttccggtgcggatagcgtcaaatccagtttacgattttcatcagccaacggcagatgcaacacgccaatggcgcgtttcggtgtcacctgacgagatttatcctctggacgcaccaccacagcggttaaataaaggtcatgacgacgccactctttatttaccggcacttccacatccaaaccttgctctggcacatcaattttttgccaccaaagtggcccttcactggactctaccaacagataacctttaccggcctgtggtgcaaccatatgcagttttatcttctcacctacctgataagcgggtttatccagagataacttcacctgatcaggacgaacagcccctgtaccaccggtattgtcctgccatgagtaacccgcccagaaattaacgctggtcactaattgattttctggattaaccacttcaatacggtacgacccccaatcaaccggaaaactgacctttgccgtaccatcttgagcaatctggatatgttcatccgccatcactaaatctttctggtcatagcctgattgccaaccttcaccatccgaccaacgccaataatagtcacggcgttcataaaccagacgggcagttaaatcttttgccgcatatttttttccattggcatcggcatacaccaccgcaaattgcgccagtgaattttcatccacattgtaacggctttgataacgacctatgcgatagtcataaatctctttctgattaaacaacggacggataccaaccagcttttcagtcggccaaacagcctgttcaacccgacgagttaccgggcggccaccagattcaagcaaactagcctgtacaatgacatttaccggcgaaaagaccgaacgccaattgtcggcactgacattaattacggctttaccctcattacctaaaaccaggtcaaattcatccaatgtacgactaagattgtcctctgcaaccgcaccaaactcatagcctggcaattttgctaccgcatcccgagctggacgcaggaatagttgcccttgcaggcgattatatgcagcaggtgctccatatagataacggccgttaatcgcgaaatccacatcgtggtctttcatcaccggttgcgactcactactaatttccagtgccatacgctccggcataaaatcttcgacattaaacttgtaataacggagtttgttatcgcccaaatcaaaacgtagcgaccagagcccggtagtcgctgactgggggatcgcatagcgatactgatacaacccattttcgggttgccagacaaaactacgaacaacctgaccatcggttttcaatacatccactttaactggctgacttttcattgcgcggccatcaccatcacgcagcaggccattaacaatcaacgtttcacccggacgatagagatcacgaggcccaaaaacaaaaaactgtttgctatacccttgcgggccggaaatatcaaattcagacagatccagcgccggtgataccaaatcaatcatactggtttggtgatcacgggtagcgagcaatagcttcgctttcgcatttttttctaagctggcgtgcccatcatcgtccgtcgttgcctttgtcaataactgccctttgtcatccaacaaacgtatttccacccctttcaggctgccaccttgtgccaaagattgggtaaacagatccattttatccagatagctgtgcacagaaacaccaatatcacttaaggtaaacattgtcgctggattggagtcagtgtatttacctgcttgttgcatcaccgccagataaaccccatcttgctgtaactctttgatattacttaatggtaacagtaatttttcgcgggtattcagtgttggattcagatcgaaacggccggtataaaccagttccgcatctttgagcatctcttccgattcccaagaactcatattgttgcgatattgccactgtgcaataaaagccggtaatgccgtctcttttattctgaaaaaattaacatcaacacgattaacattcagagccaataccggcaaaccttcagcaactttactgggtaacaaagagcctttgctggcaaaaccgacagacggagaaatcgtcgcggttgtcagcgttttctcataagccgtttcgagttgacgattattgatacctttaacatctttatctacggtcaattgcaacttacgggagggcggcaaatggcgcaagcgcagttccatcatgttatctgacagttcccacgccccatcaagtttgccctctttgacatccaccaaacggacattctgtgcaaaatcctgattcggatctaaagggacagaaaatgtcaccaccattgcactagcgccatcaagctgaacttcagaagcatccagaatcttcactggtttaccggcataacgttttactaattcagccagtgatgctgcgtctttcggttttactgattttggtggagtatttgattgttgaggtgctttttcgctttgaatttctgtggactgcgattgagccgcttgcttattatcagtgctatcagattggtcacaaccagaaagcatcagcaaaaacgctaaaatcaccgccaaataacatttatttattcctggctgttgccagaattgaccttgattcataaccataacccctgtcttaactccgaccaactaatggctggtaggatttaatgaataactttatatacccgttatctttcaagttgcctctttgttggctgcactcgctcaccccggtcacatcgttatctatgttatctatgctcccggggattctctcccttaccgtcgcgatccatcttgaaatccattgggtataaatcaatatattaaatttaaatcaaatagatataatcacctatatacctatgatcaacttatataccgcctatttatataagcaacgtaaagacattaagttcatatatccgtcatctttcaagttgcctctttgttggctgcattctctcaccctggtcacatcgttatctatgctcccggggattcgctcccttgccgccgcgatgcatcttgaaatctattgggtatataatagcctgttattttaatgaattaaacatcacagaaacgataaataaatataaatttatcgattcaatttttcattaagaactcaatatatcttgtaaaaaaaattttcgtcattttcctcagtgaccgaagatagagcttcactgcaccatccgcttgataatttacaaacagtaaaataatataaaatcgaccattaaaacaaattaaataaaataggaaattatcattattgtaccggttataaatatcattatcggattaaatatatctggttccaatataccattatttaataaattaattatctcaaccaataaaatcaataaataactttaataaaagtatatttaacattttatttaatacattattaaccatttattgagactaatcattatctcaataagatatttataacaaatatacccgccatctttcaagttgcctctttgttggctgcactcactcaccccggtcacatagttacctatgctcccgaggattcgctcccttgccgtcgcgatccatcttgaaatccattgggtataaaagctatgtaaataaaacacatttaacttctgatgcagaaattaccattaatctgtaatctataatctataatctataatctataatctataaatagagtgccactttcctatcaaaagtggcaataatgatttgcgtgaaacacggaatatacaaattgttttttataaaataacaataaaaccctcaaccccaacgctatcgcaaatggggtaataacctgatgaacatccattttctcaacgactttcattatgttactcgactaataatacctgtcctgtttttagctgtttgacatttggtaaccacagtcttccccagctaccagtacaatgacatccatagacctcttttatattttcttttataaaaaattctctgatcttcaataactccgtcggtaacgctctccttaaatgcaatccgcctattaccgcgcatactttgtccacaccggtaatcattttagcgtggttaataatttcacaaataccagaatgaccacagccaacgataatcaccaatccattatcacttttccaaattaacgcactatcatccaatatataatcattggcccaagagctctttctaattaatccaaaggattttcgatgatcatttgctatttcccctgaaaaaataaatcgctcacttatcttcatatgcgatttcgttaaccgaaaaaaaactctcttcttgactcgtttattaattttacccgacatttttttaaattttaacgcaattttcctgaacataacgccataatacttctcatttaatgcatcaggatgacatattaatttagcattatgtggaaaatagttaacaccacctatatgatcagaatgcccatgagagataacaattttggatatatcatcaatagatatccccatcctatttgcattctcaatatagctaccatccgggccggtatcaaaaattatcttctcttcaccatcttcaagtaaaagactcaaaccaggcttagctatcaaatatgaatcagatgttttattttccagtagtacagttatttttaacgacatagcacatccattaattttgttgaagtcatgcttctattaaacggtacgggtaacaatagcattgacgtacatcaataaaataatgaaaagccattatatcgtcacatttttataagcagatcacaaattccttctcctcgactgacagttaatttttcaacatgaaatgattatctctctgtcatatttattgtcttgcaatattaacatacaaatattataccttgctgtacaacatatttttaaaagaagagataaatatattattaataaataaaaatcaacggcaagccattcaattaatttaatcaaatagactatactaatgcctcacataattgacaatgattaattttagatatcactataagaccagcaattgacttatattaccacgctcatttcatccatattataagataaaaatataatatatttatcaaatataatttaactttatattacataaaaaacatttaaatagcataattaataacgttatatataaacatcatctgttgttataaacataacctattcacttatatcaaaccattattaatgcctttattaatacgataacaaaaatatattatttttatgtaaaaaaatagaattaatatatttcttggattcacataataagtgcaacatcgttaatccggaagtaaacatatccgtattccttataaataattcattggatgttttactacccttagttttcgtgagcgattacttaatcggtttatacccgtcatctttcaagttgcctctttgttggctgcactcactcaccccggtcacatagttacctatgctcccggggattcgctcccttgccgccgcgaagcatcttgaaatccatagggtataccacaaaatctatttcctgctcagagacttcattaaaatcggttccctttagaaagtattaactgattaacccattgatatttttattgctcccttctttcccaagataaatagggtgagaaaagtaaatttacgcctctaatttagttcatgctctccaaactccaaacatcgtatcatcttcccaatagccactacgttcaactctccaatcacggagaatggcgctaacaaatcatgctatttatcccatatgattatgaaggatttaggttaagtgatcttctggtagaacgagcggcagataataagcaagattggcatggataaccctaacccctcacataaccataaaagacgatatttcatcacaaatttacaataagaatcacatttcatttgaatgaataccgaaatcaatcattataaatgtgatattaatcacataataaaaacaaaaagataaaattaatttgaaattattaatgttgattattaaatgattaatattaatctgttttttatacaatgctgttacaaaataatcacattggcctgttttttgctttgtcatataacctcttgtttttgctgctatcttaaccaaccccctattttagttgcccggttgataatcaacactaaatattgatctctaagttaaattcgtggttaatgctgtttcaacattgtggaatagcaagtcaatgaaaagcagtattgtagtattaatagttttttgtagcgcagtctcaggtagtcaagccgccgacatcgcagatcaacaactcattcatcaacaggcccgccagcaagccctggagacgcaattagccccgccgcctgcggaggttcacctgtcggtaccggaaaccggggaatcatccgcctttgcggtggaaactccgtgttttcccattacccacgtcagactggcaggtaccgaaaatttcccgcactggttaccgttccggcttgtcgcccaacagggcgaaaaccattgtctgggcgataaaggcattagccggctgataacccaattgcaagatcagctcattaatcacggctatgtcaccagccgggttctggttcctcgtcaggatttgcgtacccaaaccttaaaactggtgatgataccgggaaaaatccggcatatccgctatacccctgacagcgggaactatatccagcggataaccccctttcccgcgcgtgaaggaaaattactggatttacgggatattgagcagggattagaaaatctgcaacgtttccccaccgttcaggcagatatgaacattgtcccggcagagcaaccgggggagagcgatattgtgctggactggcgtcagtcccggcactggcgagtcgcgacttatctggatgataccggctccaaaagcaccggacgttatcagggcggactcaccttctttctggataatcccctggcgttaagtgatctgttttatctttccggtggacgcgatattcattcgtctgccgggaaaggcagccaaaatgacacgctctattactctttgcccttcggctactggatggcgagcgtgacggccagtcattacgattatacccagacaatagccgggctgaatcaggcgatccaatatcggggcaaaagccaaaacctggcggttcagcttagccgggtgctgcaccgtaatgccgaccagaaaaccctgcttaacggtgaaatttatcgtcgggcgtctcgcaattttattgataacactgaaatcgacgttcagcgccgggaaaccgcgggctggaagctggggctgtcccatcatcactttatcggcagcgcgacgctggatacccgggtgacttatcaacagggcatgcgctggtttggcgcacaaccggcaccggaagagtaccgcaatgaagggactgccttacccaaaatcacccagttctcagcgacgcttgccgggccgttaacactgttttctcagcccttttcttatcaaacccaatatttgcgtcagataagcgccagcccattgacgccccaggatcgcttctcgattggcggtcgctggacggtgcgcggctttgatggcgagttgaccttatccgctgatcggggttggtacagccgcaacgaactggactggcaaaccccgctgaaagggcaatcgctgtatctggcaatggattatggcgaagtgggcggacggggcagcgatacactgctcggaaaacacctggcggggagcgctctgggctggcgaggcagcctgaaaggggtgagctacgacctgtttgtcggtgtcccgctatccaaacccgccggtttcccaacctcccccgtcacggccggattcaacctgtattggcagtattaattcaaatagcaaaactgccggtgggtagtgttgtgtggagtaaaaatcatgaacaagcagttatatcgtattatctttaatcaatctcgccagatgtggatggtggtggccgagatagcgcgggccggacggggaagaaccggacgccgcgcacgtcgctccgcttcaccgccgcgttgttgccggctgactgcgctacggtttggggtgttattcgcccttggcggaatttcgcttacggcacaggcggcgattgtggccgacggacaggcaccggggcgtcagcagccgactattattcgcagcgccaacggcacgccgcaggtcaatattcagacgccgggcgccgatggcgtttcccacaatacctaccgtcagtttgacgtggataaacagggagttatcctcaataacagccatcaggctacgcagacgcaactcggcggcatggtggcgggcaatccgtggttagctaaaggggatgcccgcgttatcctcaatgaagtcaacaaccataaccgcagtcacctcaacggctggattgaagtggccgggcataaagccgaggtgattattgccaatccggcgggcatcacctgtaacggttgcgggttcattaactcacatcgcaccacgctcactaccggacaagcgctgatggagcgaggccggctgaaaggatttgatgtcaatcagggggaagtgcggattgacgggcacggcatggacagcacacagcaaagttacaccgatattatcgcccgttccgtggcgattaacgccaaattacacgcgcaagacctgaaagtgaccaccgggcgcaatattgtggatgcggcgcatcagcaggtggagaaaaaatcggttgacgatgaaaagcacccggcgtttgcgttggatgtggcggcgctgggcggcatgtatgcccataaaatcaggctgataggcaccgaaacgggggtgggcgtgcacaatgccggtaatatcggcgcgtctgccggggagttccatatcaccgccgagggccggatagagaaccgcggcaccctcagcagccgggatacgttgcaattaacctcgtctgccgatgtcactaacaccggcaaattgctgtcacaatcggcggtgaatttacaggctaaaggtgcgctcaataatcagggccgggtggaagcccgcggcgataccaccgttactgcgggcacgatacacagcagccatgacagcgtatgggccgcggggctggatgataacggcaacactacccgacccggctcattgaccctgaccgcgcagcacgttcaggctaagggcaaaaatctggccaccaatacgctggctatccacagtcggcagattgacctgagcgacagccagactgcggccggacagattcaactcacagccggtcaatcgggcatcagtaccgctcgcgccagcgtcaacgccgaccgtttgaccgcaaaaacgccgggccagtttaacaacgacggcggccagttagtggcgagggcaatccacctcacaacgccggatttatccaatcagcagggaaaaattaaccagaccggtaccggtgaactgacgctccatacccgcaccctgaataaccgtgaagggacagtgttcaatcaggggaaattgaccctcaccactgaccggcttaacaaccgtcagggcactattgccagtcagggcgaggacctgcatctcaccgcgcatcaggccgataacaaccagggaacggtgcaactggcaggcaacgggaaactgtcgctcaacacgcaacggtggctgggtgataagggcaaattgctcaccaatggcaccctgacgatacaggccggtgaactgcaactcaaccacgccgaaactcaggccgggcagataaccatcaacgccgatactttgagccatcaaagcggcgtgatgcaacaatggggtaaggatgacttgtccctcactacccggatactggataaccacagcggcactattgcgggcaatggcaacctgaaccttaaggcaacgaccgtcgataatcgtcacggcaatatcgtggccgccgaccaaggttcgctgaaactgaccgtcaaagacacgctggataatcagtcgggcaaactggaagcgggccacgcgctccaacttagcgccactcaactggataatcgccgggggagcattgttgccgccggggacagcgccaccctcaccgttggcaaaactattcaaaacgctcacggccatcttgaagcccaaacccgactgactacgactagccagacgttggataacacccagggggtgttgctggcacaaaacattgacagccagaccacaggccatcccttcaccaataccgccggacaggtgatagccgaagacaccctgacggtcaacagtggtcaactggataatacggcggggctgttacaggccggtcgcgagatggccgttgatacccacgggcatgggctcaccaatacccaccatgccgaccaaaaagcgggccggttattgagtggcgggcagttaactttgcgcaccggcgacatcgacaacaccggagggatgatcgcagcggacggcaaaaccgtgctgaccagcaccgcgctcaataatactcagggccagatagccgggaatggcgggctggacattcacagtcaacaactgataaaccgcgaggggaccttacaatccgccgacgccctgactctggataccgacggccagttactggataaccaacaaggccagattatgggtgagggcaagaccactatcaccagcggcccactggacaatcgccacggtcatctgcaaggcggacagttggctattgacacccgacacgccgcgctggataaccgggacggcaaactgttatccaccgacacgttaaccctgaacactcaccagctcgacaatcgtcatgggcaggtgcaggcggtgggcaacaccgtgttgaatgttaagactcaaaccgataacaccggtggccttatccgtggtggcacgcaactcaccctgaacaccgctcacctgattaaccgcgagacagcacacacggataacgggctggaagcgcaaaacctgacggtaaacgcgcaacaggtagacaatactcagggcgctttacgggcagccaaccatctgcaagttcaggtgagtcacacgctggagaatgctcaggggttaatctccgcgggcaaacagcttaccgtaggcgacgcgacccgtcctgcgtctctggtgattaacaaccggcaaggcaccctgattgccggggaacaggccacgattaacgcacatggcctgagtggggacggccaactgttatcacagggcgatatggcggtcaccttaaccgaggattttcaccataccggcaacacggcggccaatggcaatctgaccctgaaaacgaccggcaatcttatcaatgaccgccagataaaagccggtcaaacgctgcatcttgatgcacacaacctcaccaatagcgcctccggtgaaattagcgccggacaaacacaaatccaggtccacgatacgctgaacaacaccggactgattgacggcggcctgacccacctcacggctaataccctgaacaacatgggtaccgggcgtatttacggtgaccaacttgccctccagacgggcacgttgaataacaccgcacaaaacggcaaagccgcggtgattgccgcgcgtgaccggctggatattggcaccggcacactgaacaacagtgaccatgcccagatttacagcgtgggcgacctgcacatcggcggccggttggataacaccctgacggccaccggtcaagcccgtgtgctcaataaccacgccgcgacgattgaagccgggcgcaacctgaagattcaggctgaccggattaacaacaccaacgccgggttggtgactcaggtcgtcgaaacggaaaaatcgccacatcacgatgccgtactgagcggccagaccacccgttacgactggtcgcaggtagacacctcccgccacaataaatacggcgtgcacgatgccatcatgccggacggcagcggcagtaatgacttttacgaatatcagtacacccgcaccgtcagggaaactcaggttaaacagagtgaccccggtaaaattctggccgggggtaatatcacgctcaacagtgcgcaggtcactaatcacgacagccagattgttgctggcggcacgctcggtggtgaaattggcgaactgcacaatattgccactcagggcgaacgtatcaccactgataccggcagtcagacccactggtatgcaaaaaagaaacgactgaagccccgattccgtggtaccaaaacctcacaagggaaaagccgcagccgttatgctcccgcgccggtaatagaaacgattgatttgaaaacgctggcctggcaggcgcatacccgtccacagggtaccgatattacgattacggaccgacaaaccggccagatacacgctgcccccacggcggtcacaccggtgaacggtatcaacaaccagccgctggtgctgcctcccggtcagccgtttgaactgagtttgcccccggagaccgtcaaaggacaaactgtcgacccggtgatacgcgtggtgacgcccgatacccgcttgccgaataacagcctgtataccgtgcaaccgggcagtgacagtcactatctggtcgaaaccgacccgaaattcacccagtataagcagtggctgggctcggactatatgcgggaacaactcactcacgacccggcgctggtccacaaacgtctgggcgatgggttctatgaacagcgtttggtgcgtgaccaaatcacccaactgaccggccagcgctatctgtccggttacaacaacgacgaagcgcagtttaaagcgttgatggatgccggcgttgcctttggcaaacagcagcaattaacgccgggcgtcgccttaagcccggcacagatggcgctgctgacctcagacattatctggctgactaaccaaaccgtgactttgccggatggcactaccgaggtggtcaccgtgccgcaggtttatgcgcgcgtccgtcagggcgacctgcgcagtgacggtgccttgctggccgggaataccgtggcgctcaacaatcaaggcgatatcaccaacagcggcaccatcagcgggcgtgacgtcactcaactgacggccaacaacctcaccaatagcggctttattcgcggcggtaaagtagatttagcggcccaacagacgctcaccaaccggggcggccagattcagggagatgaccgggtgactctgaaaggccgggatatcaccagcgcatcgaccgtgcgcggggatgaagctaaccgctggctggaccgtccggcaggcatctatgtgcagaacgataaaggcaccttatcgctgagcgccattaacaatgtccaattaaccgccagtgacgtcaagaatgccggtaaagacggtcacaccgagataacggcaggccataacctgacgctggacgccttaagcacgcgccgcacagagcaaggcgactgggggaaagataacacccgccatctgacccaacaacaggatatcggcagccagataaccggcaccggtgaggtgaccctgcaagccgggcaggatttgaacgccaccgccgctcacgtcaacgccggtcaacacctgacggcgcaggccggaaatagcctgacgctgaccaccgggaccgcctcatccgacttagtggagcacagcaagcaaaccagcaaaggctggctgtcgaaatcgtcagtggaaacccacgatgaagtgcatgaccggcaggcgctcagtaccacattcagtggcgataaagtgaatttacaggccggaaaagacctcaatatccgcggcagcaatgtggcgggcacgcaggatgtcagcctgaacgccggtcatcagctcaccgtcaccaccgccgcggaatctcacgatgaaacccatttgcggcaggagaaaaaatcgggcctgatggggactggggggattggcttcaccttaggtaaagccagccagaaagtcaccaccgacagtgaccgccagctgagtaaaggcagcacggtcggcagcagtcagggcaacgtcaccctcaacgccggagaacagctccgggttcacggcagtgaggtgattgccggtaaagacctgacgctgaccggtcaacaggtcgatatcaccagcgcggaaaaccgccatcacaccacgacaaaaaccgaacaaaaacagagcggtttaaccgtggcgctgagtggtgccgctgggggtgccgtcaacagcgcggtgcaaacagccagagccgcccgcactgaaagtgacccgcgagtaaaagccctgcaaaacactcaagccgccctcagcggagtgcaagcggcgcaggctggccgactggcggcggctcagggcagtgacgacaaaggcaataataatctggccggggtgagcctgtcttacggtcggcaatcttcccgttcagaacagcagcaccgccagaccacccaacagggcagccatctcactgcgggagataacctcacgataaccgccaaaggggatgacaaaggcgcatcaggccagaatggcgatatccgcattcagggcagccagttacaggcgggtaaagacctgcaactgaatgctcaccgggatattcagctctcctccagccagaacaccgaacagacgaccggcaaaaacagcagccacggcagcgcgctgggtgtgggcctgaccgtgggaccgggagggactggtttgaacatctcggccaatgtcagtcggggcaacggccgtgaaaacggcaacggcgtcagtcacactaacaccacgttacaggcgggacagaccgtcgggctgaacagtggccgggacacgacgttaaaaggcgctcaggtcagcggcgaacagattaccgccgaggtgaaacgtcatctgaccctcagcagcgagcaggatagccagcgctatgacagccaacaacagaatgccagcgccggcgtcagtgccaccgtaggccccctcaccaatggtaccgcgagcctcaatgccagccgcaataaactccacagcaactatgacagcgtgcaagagcagaccgggctgtttgccggtcaaggcggctatcaggttaatgtcggtgaccacacccaactggacggcgcggtgatagcgagtcaagccgacaaagccaacaacaccctgaacaccgggacgctgggcttcaaggatattaaaaatcaagcggactttactgttgagcaacaaagtgcgggcatcagcctcggccaaccgaccgccggtcaggttctcaataatctggcggtcaatgggctgacagggactcataactcaggccatgacagcaccaccacgcacgccgccgtcagtgacggcaatctgattatccgggataaggcgcaccagacgcaggatatcgcgaacttaagtcgcgataccgataatgccgcgaatgtcctgagtccgatatttgataaggaaaaagcacagcaacggctgaaacaggcgcaactgattggcgaaatcagcgcccaaatgaccgagatagcccgtacggaagggaaaattatcgccaccaaagcggcgaaagcgaaactggaccatatcagtgaaccggacaaagaggccgccagaaaaaaactggtcgacagtggcaatccacacccgacttcggcagatatcaataagcaagtttatgacaccgcttacacgcaggcactgaatgactccggcttggggaccggcggaacctatcaaaaagccttacaggccgctacggcagcgattcagggcttagcggggaacaacctcggtcaggcgctggccgggggcgcttcaccgtatctggcgggcgtgataaaagagctaaccaccgacccgcaaacccatcaagtggatatcgccaccaatacgctggcccatgcgattttaggcgcggtggcggcagaagtcagcggtaacaatgcgctcgcgggtgccgcgggtgcggcgtcgggggaactggccgcgcaggtcctgataaagcaactttacggtgatggggccaacgtcagtgagttaacggaggagcagaagcaaactatcagcaccctttccaccctggcagcaggactggcaggcggtattgccggtgactccaccgggagcgctgttaccggggcgcaggcagggaagaacgcaaccgataataatttcctgggaaaactggtaacagaagggtgtgcaatagctgctccgtgtcgagccaaagtggcagaaaaagtcctggagataggcgttaaggcgggtataaccggaatagtggcaaaggaaatcgctgataagatttcttcagaagacttagaccatctgattatgcttcagatgatgggaaatgatgaaatcacacagagttatctaaatacacttcaggataaatacactcaagttgctaatccaactgacctaccaacacataccggcaatacggaaggtaagccggatgtaggtggtaatacgacggtgaccccaattcctgatggcccgaaaaaagatgattttatttatcaggccaaaggagaaaaaccagaaaactattctcctgtaggagcaggtaggtcaggtgcatttaatgaagcaaaacgtcgctcaggaattcctattggaaaacatcctgatagagtattgccaaatgttgataagcgaggaaggctccagcctggaaaaatttatgaatttgatgttcctaaagcaggagggggaactcaaactatacaaattagggatgatgccaaaggtcatgattttggaataaatgatccccagaatagagggcctcattttaatgatgaaaaagggaatcactatgactactgacatgatagttaggtatgctactgatatctgtaaaaataacgatatcactaattttagttctttatttattacagaaatgaatattgaagcggtaagctgggaactattagatctaaatcgcgaaagaggttttgtaccactttttacgaaaatggtagagacgctagaaatttatgatgatagaagttctatttatttatatatagaactatctggcgttcaaccggacacatctattactcggtataaacaagcttggggattattaaaatcaagaggaaatgatacagaattcgcgttaaaaaaacagaatgttatggttcagtcttcacggggcttgactttatcagggttatgtcacttttatctttccgatttaaaaacagcggcaaagttagtattaactgaaaagaaaacatatttggcacttatccccgacgaaaatatttatgagaggttagatataacacaaattcgacatatttcagattgggcaaatttcatttggcaacataatggcatcgttttaatgatattaggtgctttcgatgatcttggctgtgagattgttgcactaggaaggaatgagaatattttttctctaacaaaaggttgttattgagaataactatctgagcgtgaatgagctggacagttttgcgcatcaagcccgcacctgtgaaggcgaaagctgcaaacaagtgatcaaggatatggtagacactaatatccgcaatcagcaggaaatgatggatttctgcaacagcaacccgacccagtgtgcacagaagtatggttatctggttgatcagtggccggtgtttgaacgtaccctcaaaaatatggaccgggatggcacattgccggttgagttcagaaattacctgtcggcggtgaatacgttaggtcaggcggccacaggcaaggtaggcgaactcggctggacaaaacgctttgaggcgatgggcatgagcaaggaaacggccgctgcgatggcgatgacattgccaattgtgatggagggggctaaagggccgaagtcatcgccaacaacaaagggaagcacaggcgcggctgttaatacagagaaaacggcgctggaaaagattgggaaaaacagtcaaggcacaacgaatctgggtgataaatcggataatactgtttatcatcaacagcttatcaaaaatgctgaaaagatatctactgcgaaaccaggacaacaagttgctgcgccaagggatc

SEQ ID NO: 34 - DNA, 249878 bp, Photorhabdus luminescens
  misc_feature (37565)..(37565): n is a, c, g, or t
  misc_feature (44631)..(44631): n is a, c, g, or t
gcaaatgcagctgaagtttattataaagacggcaacaaactggacctatacggtaaagttgaagtccagcacaaattcgctaacaacaaaagtggcgaagatggcgataactccttcgcccgtctgggtttcaaaggtgaaactcaagttaatgaccaactgaccggttttggccgttgggaatacaatatcaaaggtaaccgtgcagaaggtactgacgaagaaaccaaaacgcgtttagctttcgctggtttgaaactttctaactacggttcactgaactacggccgtaactacggtgtggtttatgatgtcaacgcttggaccgatgtgttgccagtatttggtggcgactcaatggcgcagactgacaacttcatgaccggccgttctactggtctgttgacttaccgcaataccgatttcttcggtttagttgatggcctgaattttgccctgcaatatcaaggtgaaaatagtgaaaacacggctaatagccgtatcaaccgtaaagacaacggtgatggttacggtttctctgcaacttatgacgtaggttatggtattagcgtccgtggtgcatactctaactctgcccgtacttctgcgcaaaaaactgcttttagcgttgttgaggaaaaaaggaaaaaaagacaaccctacgggctctacggccttgggtgatcgcgttaaatcatggaacattggcgcccaaatcggatgccaacaacatctacctggctcccatgtacggtgaaacccgtaatatgactcgtttcggtggaaatgttgacggtgtaaattgggaaaatatcgctaacaaaacccagaacatcgaattgaccgcccaatatcagttcgacttcggtttacgtccatctctggcatacgttcagtccaaaggtaaaaatctgctcggtgacgatgggaaagaatccagcagccgcgatctcgtaaaatatatttctgttggtagttactactacttcaacaaaaacttgactacctatgttgattacaaaatcaacctgctggatagcaatgaattcaccaaagcaacgggtaccagcactgacaacgttgttggcgtaggtatgatttaccaattctaattaccgttggtaaatagatttagctgaacaagttaaacatcattaagagaaagcagcgcttatgtgctgcttttttagtcttatattttctttctttttctcactccgcaaactgcctcacaagattatcttctttttacgacaaatagttggcaaactgttttagcagcgttaacctgactgcccttttgggcttaactctgagctttggaattacaaacatgtttgagaaaatcaccgcagcgcctgccgaccctattcttggcttagccgatagtttccgttctgatcctcgtacaaataaaatcaaccttggtatcggtgtctataaagacgaaacaggaaaaaccccggttctgaccagtgttaaaaaagctgaacaatatttactggaaaacgaaacaacaaagaattatctgccgattagcggcttagccgaatttggccgcgtaactcaagaattactgtttggcaaagatcacccagttgtcacagataaacgcgcccgcacagcacaaagcccaggcggtaccggtgctttacgtattgctgcggatttcattgccaaacagactaatgctaaacgagtttggatcagcaacccaacctggccaaaccataaaaacgttttttccgccgctggtctggaagtctgtgaatataaatactatgacgctgaaaaacacgcgctgaatttcgaagacatgctggcaagcctgtccgaagctcaggctggtgatgttgttctgttccacggctgctgccacaatccgacaggcatcgatccaaccccggcacaatgggctaaactggcagaaatgtctgcggagaaaggctggttgcctatttttgatttcgcttaccaaggatttgccaagggcctaaacgaagatgcagagggcctacgtatttttgcgaaaaatcataatgaactgattgttgccagctcttactccaaaaactttggcctgtacaatgaacgtgtcggtgcctgtactattgttgctagtgacagtgatacagcagaaaaagcgttcagccaagctaaagcgattatccgtgctaactattccaacccacccgctcatggtgcatctattgtcactaccattttgtcaaatgaagacctgaaagcagcttgggaacaggaactgaccaccatgcgcgaacgtatccagcgtatgcgtcaactgtttgtcaataccttgcaggaaaaaggggcaaaacaggatttcagctttattattagccaaaatggtatgttctcattcagtggcctgacaaaagaacaagtagaacgtctgcgtgatgagtttggtatatacgctgtcagttccggtcgtattaacgtcgctggcttgacgttagaaaacatggctccactatgtgaagccattgttgcagtactctaaattaacatttacctcacgatgaaaagtcgctgaaattcagcggcttttatcattcagaagattcgatgtccgacacaattgtgatattaatcttattgagtacatcggaatgaagttgaaatccttgaagggccagttaaacgtaccggagcaaacggagccattatgtccgtttattttcgtgatctggatcaaaatctgactgaagtctccaaccagttatagttgccatcaaacaactatcagccagccctcaaattgacacttataccctatggatttcaagatgcatcgcgacggcaagggaacgaatccccgggagcatagataactatgtgaccggggtgagtgagtgcagccaacaaagaggcaacttgaaagatgacgggtatattgaatataaacgctacaccacatcaccaacttggtacttcatcctgtaaaaatggattagtctgccgctcatgacctagcgtcgacattggtccgtgccccggaataaattcataatcatcaccaagtggcagaagtttatctttaattgagttaattaactgccggtgattaccgcgtggaaagtcactacgcccaactcctcctttaaatagcacatctcccatgtaaatcagcttatctacatgattcacaaacacaacatgccctggcgtatgtcccggacagtgcaatacagataagtcaacgccccccacccgcagctcatcaccttcatttaaccagcgatcaggttcaaatgatggacattcttcaatgccaaacatccgactttgagcttgcaagccttcgatccagaaagcatcttcctgctgtggcccgtagaccggcgcattaaaatgtttagcgacctccgctgttgcaccaacatggtcaaaatgaccatgagtcaataaaatctgggtcaatttcagaccacgacgttctatctcggcgatcaatttttctgcttcaccgcccggatcaacaattgccgcttccttactatcttcattccaaataagggtacaattctgcataaaagcagtaacaggaataatttggtatttcattatttcatttactccatagtcaaaacaaaatagttactcaccagattaccacgtcctgacgggacctgtatcaatatgaacgaaattactgtgtggatagtatcctacccctcccgctttcattttcagagcagccttgcagatacgactaagctcaataccttcaatatgaaaatccatcgcccgcccgcgagtatggtaactctgtttagccactcctttactttgcttgcgcaactgattgttggttaccagtgaacggtaaccagaaataagttgtacaggcttattaatctctatcatcatttgcagcaaataaatctgatcaaataatttaggatcgatagtcttaacgctattttgacggtaatctcgaaacagatgatccaagcgggccagctcttctttgttgtaacgatagccgtcaaaaaattcggctttaatcgtttcacccgtatgtaagttgtcaaaacgtaaaattcgtgggcgtggagtggccagagtggcaaaagtatgccccggcaacaaactcaaacctaaagcagcggctcccgcactaagccacttacggcgattatgatcgataatatccatgaagaaacatctacccaaattatagaaaaaataggccaacaggcaattggtcactggtcaatatgacaattaataacaaaaattagttgcatttagttttgtaaaggtaacaactttgacaaaaactgggcaccttgtctcacactattgtcgtaatcataaatatcggtacggtactgaggtaccccctgctcatctacccaagcagttaaataatgcaaataaactggaatacgctgtgggatgttaacataaacggtattgccctgtttcagggtattattcactttactctgatgccaacctacatcttccaataacatacttgctaattctgaagccttgttaacccgtacacaaccagagctgatcgctcggatgtctttgttaaacaagttatggttcggcgtatcatgcaaatagatagcatcagaatttggcatattaaatttataacggcctaatgagttagtcggccccggagcttgccatattcgataaggaaagttagcaggcgtaatcacgttccaatcaatagtgtaagggtcgattacactggcatcagcacgccaatttgaaaagataacgtatcctcgccgttgaaaatatccgggatcatcaactgctcgtggtgcgatatcttttcttgccaggctagttggcacactccagggaggattaatcaccacattattcagcacactactcataatgggtgtcttccggcttggacgaccaacgatcactttcgagtccaacacttcctgatcattaagataataatgcaatgaataatcgggaatattgaccataattcctgtggacacatctcctgggataatacgtaaacgctggatattaagcgccatcaatcctgctctggtttgaggcgaagtatttagccaatctcttgtgcgtttaccgattacaccatccggagccaacccttgccaatgctgaaaattttttaccgcagtcaccagttcaggattgtagatatgatctgattgagctgtcagttcgttcaacataccaagacgaataagtatttccttcaacacagcaacatcagcgttattctgtcccggttttagcgcacttttaccagaaagctgtggccacggtttactatcagccagttgtttcatcatctccttgcgcatattttcatattgcggatgttgtggtgccagtgcagcgacataagcggccacattatgatcgataatagcttgctgccactgatctataacgactggtgaaggtaatacaattttgtatggtacagtgcgatagagccagcgttggccctggtggccgacatctgagacaaattgtaaataacctagcatagcatccgataagatgagatcacgtcccatctgactcaattgagcatcattgagttcaatcagccattgaccaaattgcggctgaaacccagccaatgccagttctgaaagttgttgttcaaaccttcattccgcacctaattcaggaataaaccgctttatattgtgcacctaataaactcaaaagctcatggtggtaagattgcattcctgtcaccattttatgttcttgaaattcaaaggtgctgatcccttcaaaggccagaaatacccaacgcgcggtgggggattgtgtcggtttgttcttcatatcggggaaaaacggcacattttgtttcaattcatggcgaattttatgttccagcgccgcataaaccatgagacaacatgtcatcaccattaacagcgcttctatccgctccggttttttcaggaaaatggcagacgtcaggaattccggacttttcaggaagcgaaaaccccgctccaccttttgttgtgccttataattagccagtaacgccgccatatcaagccgtccttcatcccgttcattggtcgctaaaataaacctcccgacccgcaatctggcctgcttcaccttgtctaaccgggtataagcctgaccggctaattgataatgaaccgatttggggggttgatgcttgccgggtttcccgcgccccgcatacgcggtaatcgcctgaatttccggcgaggcgatgccgataaactggcattgagactcaaaatcatgcagtgcctgtaaggcatcctcccggcaggcaaagggctttttgcccagtttgtcgaactgtttagactcgttttctgtttccctgagtgtgtttttccggaaagtctggttttcacgtttttctgccgccgtactgttcaccagtaaccaacgctgaggaacgccgccatatgatgacgtcacccagcagcctgaatagccctcactgatggggctgaattgctccgctgtcacgttcaggagagactgtttagcttccttgatcgtcaggggaacacgcgtaataaatcgttgtttttgctgatgaagcgaagcgatcgcggcttcagtataaagggcggcatcggccacaaagtagcggctgttttgtgctgctttcaggcattgaatatgggttttgatcgtctgggcaaaggctttggcatcattcgtattcccgctcatagcctgcatatagacagggatacctgcctgattttcgcaaatcagttcaaggacaacctggttcagttcaggccggtgatcccggctataacccggcaccagtgcaatacgttttgtgtcatctcccaatgcgctgtcatagtcaccatcgacatgaaaactcgtgatatccaaatgaacggaatcgggatttaaccctaatttatcaaccacttgctcagcaagcacctgataaacttccgacacccccgcttcatataaggcatccagtgtacggccgagcacatcatcattaaggtgttcagcttcaatgtcagcaccaattaaacgcgcaatcggcttatgttgaaaaaagccggaaaacatgtgcaatgtccggctgtgaaaccccagcccgttaaggatcatcgccagaaaagcgtcgccgtgagagacagtatgcgatgaatattttgggataatggcatcaatcatgcggggtaaaccggcttcatgacaaaaagcggcgataaggccaagatgatcgagacgtttaatggcaggtataggtgtggacatattcgctttccggcaaataaaagtaatagatcaaaattggcgattaccgtcaaccccaccgatgtcatcaatacaaaaaacctgtgtaagatcacattatttttaaatcagaaatacggtgcggaatgacggttcaaagcgttgaaccgcgattttatcttgccacaaaggttgcatctggttagaggagtacaaactaaccaatcggtcaaagaaaaccggcttaatttttgccggtaaccagcttcgcagcattttacggcgttctgtttctgaaattgtagcagtttgaatttgtacgcgttcaggtgttgttgtctcagatatcttttcaatctgcatttttggcagattttgaatatcaccttcaataagcctattctgatgattagctaaagcatatccagctattatcaatgtgctacaaataaccgaaatacacagtggctttatcgctctttttaccatatcaacatccccaccttcagaacattctcatgagttaattttaattatgacaaactcaaactctaatcaaagaaaaacaacaagttatttacattgtaaactatttacctacaaaggaaatataataaaccatcgccaacccaccaaacacaaaacagcaaaaaagacgccaaagcatctcgtctatcattcaaggtatgcaaaccgctttcttaattcagcagaaagacctacctgataacaggcaggcccttaattcaacgctattcctacgataatttctgatttactacatctgcttactacaacctgactggtttactacagcgcgactatcatgatgaagaagtgctatcacatgaggaagtaccatatgcagcgagaaatgactgaacagcgatagcaattcgctgagatttctcctctggagtaggtaaaccaatgcccaaagtagccttaagccttggcgttccaatgatgccatcgataaacacctccgcggagattttcgggtctactatgctcaattttccttcctccatctttcgtaccagatattcgacaagaaaatctactatctttttgacccctttttcataatagattttacctagttgcggaaaacgttgggcctccagagtgactacccgataattcgcaatcattgtttctgaaagaattaccgagaaaacttcctctgcaaaaatggttaatgctttcccaatatcgggttcgggattcatggtcttgtcaagaccgccttcaacttcttctattctctgcctaacaacagcgactaacagctcttctttagaaggaaatcgactataataggttcccttcgaagcattagcacgtttcgccatctcactgatactggcaccatcaaaaccccgttctgcaaatacttgagcagcaatttttaacagctcgttaactcgttctcctgaaattctagagtacgaacgggttcttttgtgatctgtttgggctttaggtgtatttgtcatgtaaaaaaacctaaatttttattggtaccgaacggtacggtatactattattaagactatagcagtaacacaacccgatggctgtgatcaaatggtcctagccagctacagtcaccatgattctttcagaatcacatcgtactacttatggagaaaaaagaaatgaacgttggaataattggctcagggattggtggagcatgcctggcacatggcttgcgcaaaaacggaataaaggtgaaagtctatgaacgaggctctgctacatcatccatacttcccggttatggaatttacgtcgatacattcggtcagcaagcaatgcaggaatgcctcccagaaaccaactggctaagctttaaaaagatttcaaagcctgttggtggacagacaagattctatgatgaacatctgcatcttcttctcgcagctcagagagatatttaccaagaaaatggggaaatcattaccgaggatcggatgtcaattagcagatctgaacttctagaagtactcaatgagggactctcagataccgttcaatggaacaaaacgttcgagcgttatgaacacatgccaagcggtaaaatcaggctttttttcacagataaaagtcacgaagatgtcgatgttcttatcggtgcagatggaagcaattcaaaagtacgcaagcagtacctccccgcgataaaaaggctggatattggcgtcacgctcaccgttggacgtgtgcgccttacccaagctcttgctgactcattgcctccctatttgctggatggttcgcccaacaatattgtgccgaaaagccccggtggattgtttgtctctctatggcgtgctccaatcaatactcaggtaaaagccacatcgacagaaattggcgattttgtcatgtgggcctatgcagcagcaacgaacagctatccgaatacgattactgattttcctgcgaaatctctgtgtgatctgatctgctcccgcattgcttcatgggacccaaacctgcataccctgattaaacaaagtgatatggaaaacctctctgtgattccgttacgcagtatggatcacctcttaccctggcgttccagcgctgtcacgctacttggtgacgctattcacaacatgacgccaatggtcggaatgggagcaaacatagcgcttcgagacgcacttttgctcactcaaaccctgactcgggtagcatccggtcatgaagatttaatcaaagcgatttcagattatgaacaacaaatgcggacatatgcgaatgaggcggttgagatttcattacgtaccgcgttaaatgcagccgatcgttcgatgatcaagagaatactatttcgaactgtacttcgggttgcacaaactttaccgccaataaagcgagtgctattcccgataacaaaatctgcgcaacaccagggaaaaataaaattaggtactacacactcttttagtagtacgcaataaagaggctttcactttaccgccagacaacttgaataaacgattagcaaagcatttgcggtaatattgcgtcggctcaagaatagaatttggttttggtaaaccagtgagaacctctttttgaaaaataaagacttgataaggcagaatcgattatttaccatcgtatcggccggaatatctttgtctaaaaaatataataaaaatccacgcccggattatttggtaggtttttgccaaatttacaatggcttaaccctatactatccgggccataaaaacttaagggaattatgcgtttgtaaatctattaattctgtcatttataatatccagataattaattgataattaatgaaaataattaaaaatcaattatcattcttagctacaaacatcaatgttcagcaatatttaatcatttaacctggagtatcattatcttaaaaataacaaacattccattaatagaatcagataatgaattatagataaatttattatcattattattcttatattttcattattatttccgccacacctttgtcattaagcgctcagaggataatcggcccgcaagtttttcttagctcattcaacacattctcacgacatgtatcacacgtttctagtttccatatcccgactgattttcatcagttaatcccaacattaaacagagggcagagataacgactgctcaatggcattctcaatgccagacaccgcggtaaccaccagcatcaacataccaccgatcatgaggatcgaagcgaacagaaacccacgcgtcacgatctggactttaatgatcgtttcatccagccagtgccgggcgaactttgccattgattgatcaaatccctgtaaccgcgacaacagccgcagataactgatcgcctcgttatcaggaaaacggtaaccggtatcgcgcaacgcctcaccaaaaccggctcccattgagatgtgttcaagcgtggccgcgatacgcacatacaaccagcgtgaacccgcctgttccagcaacaattctaacgcagattgcaacatcatccctgagcggatcaacaacgacacattcagtatgaacatactgccatgaatcgttcgatacagtgaccacggtggaaaccggtcaagccccgttcgcaatcgccccccaagaaaaggtaacgataatgctactaatatgaacaatatcaccagaaatatcagtgaatagagcccatagtcattaacaaatgtccccatcaaatatagggtataagccgcaccatcccaggtttctggcttagaaaccgcagccaatttcggtaccaaactgcctgctacaatgtgcaacaatacacatatcatcccaatgagcaccgcaggataaatagatgcaccaataaccgcactacggatcttactacccgcttcgatcatggcgatcgcatccatgaaagcactacgtatatcaccggagcgctcacccgcggcaatcaccgccacttcattaggaccaatccattgcagcaaactctctgacaaagtgctgccctggctcacagattcatagcaactactcaacaccaacgcataaccaccattaggcttatggccttcgtcgctggcaatattgtacatttcacgtaatgcatcaatcagcatgacacgattctctagcatcataatcagatgctcatagaaacggacccgcactttcttactgaactgtatcttcgccattcgataattcagtctggcaacaaaatcggtcattgacatagcgttttactcgatttgatagctcaccgggacaatcggccccatcacacgctctccggcacggggatcaatcattccgtcatttattttgcgaataagtgcatcgatcttactgataccgcccatctccataatccaatatcgggttgcctcatgatgatgaccggttcgataagcttgcattaagccaggagaagtctgaaccacttccgccacgacggttcggcccacggtgccgcactgtttgcaatagtcacagccctccccctgtagacaaaccgattccggctgacaataaagattcagccgtttcagcaaacgctcggagacttcttgctcatgcccttgcaggggaactttacaatgaggacataacacctgaatcagcgcttggctgaccaaaccaatcaccagccgcgaatccattaatagtgacgccatcaccgcctcatcctgcaagcggggcaaaatcgctaaagcatcgtttgcatgtatcgtggtccaaataagatggccggtcatggcggctcggaaagtcatctttgccgtcactgcatcgcgtatctcaccgaccataattacatcaggatcgagtcgcattgcatcagcgattgccattgcccattcttgctcgataaccacgctatcaccccgatcgccggtgataggcgattgattagccccttcaatctcatattcgggagggtcttcaagtgtcagcagatgaatgccggcctgctcggttatcatcttctgcatcacgactttcaaagtggtgctcttgccgctacccgtcgcgccggatagcagcaccacaccggcccgatggtccatcagctcttccaatatctgacactgttccggcaaatagccaagatcgcttagggtgcacacggtaccggggctatccgcgtacagcaatcgcaacaccattaacatgccacgatcaaggggacgtgtgttaatccgtgccccagaaagcccgcactcggcaagaaattcatccttcattcgcgcacgctgtgcttgcatcggcttaaacgtcggctccgccacatcacacatactttggtaaatcgtcgcacacagccgcaatccttcctccgggcgcaactgtcctactggccgtaaataaccatcaatacggcaacggatctcacaataattatgacgagcgacaatatgtaaatccgacgcgcgttcctcagtggcttcgccaattaagcgaatgatataacgctgaacatcggattccgttccgcctaatccatgactatgattgtggcttttgttaagacggtataattccaatatgctccccattccacaggtgacaatctgatagatgaaaccgtgtcttttaaccgtttcctcataggccagcacatggggatcaaggcgatgggaagcagacaccgccagcacacactgccccttttgcagaggcaactcaatcagacagatcaaactacggttcgctaactcgatttcaagtgcaccgctcagggcggataaaacttttgcgccctgcctgaccatacacagcagatcggagcttgttatttccataggaaaccgcctactcagcaattaacgacttaacggcaacggtggcgctaccataaaatcaagactatccaacaacgatgcatcgttagttgcggtaaggcccacgtcatagcatcgtccttgtttagcaaaagtcaccacccccgtattaatgcggatcaccttataaccattcggtaaccaatcacccgctttcacatccataatgccccccaaacgaaaccggagcgtggcaatcaacccaccgttacgtccaaagattgacttaactaaaggcaaatcgttattaacagcactgcctctattcacgattctggaaattttatcgagttcagcctgcgcatttgcccttgcagtttcggctctaagtaacatcaaatctgtctgtaatttctccaactgcgccgcaacgctattgttcgccgtcacctctgacaataccggtttctgtgcaacaggtttcgcctgaattgctgaacgctcagtggatgatacttgtgcatatgccaacgaaaataccggcaccatcaacagactgatcataaactgactaattttttgcatagaaaactccattgagttcccactgaggaaaaccatcagctaacaccactttggcactagtgaccctcaatccaggaaaaggcttacctgaaaacaaagcatctggaggtaactgagaagagagcgtccaactataagtctgccaatcgggattggcccacacctgtgtctctccctctgctctgggaggcggtggtggtggcaaaacggaagcactctcagtcaaaaccggagggggcaaatctagcgcctgaaaataagagatcaattcaatcaacgcctgatcggacgactgcaatacatcatcattatctgcctgatcctcactctgctgctcaatcggtatcaatacctgtgcctgttctcccccattggagatcaccggaccagcccggaaaatattgatggcagcaacctgaaaaatattgatcggcatgccttcatgacgttgataactcacggaaactgtatcagtatccaaacttatcgattcaacctgccaacctgccagcgacaagggcactctggctaacactctcttccatatagagaattgccgtgccatttgcggttgtgcaagccacggatgcggtggtagggtttccaccacctcacggggtaaatccggcacttccaccaccctattctgcttataggtatgccacatccaccaaccgccccccaacaaaagtgttaaaccggtggtcatggcaaagagcttaatttgatacttcgacatttcaccggttaaactttctagctgaccgacagactttttcaatatcgatttcgataatagctgctctaatggcatctccggccacagcgattcaaactccttcggtgcatagatggcatgccacaccccattagcgtcctctactaactgtaccgtctcacgcaacttcgtctcgatctcttcgcgcgttccgatcaaatcacgtccagccatgattgcaccctgatgtactgccactaacgcataacacgcatcagacaaacgaaacgcgccgatccagttagatttatccaccactttagccaaaacagcagccaatgaataataaccgggttctcctgcctccttcggcgcataaccaacctgaacacctcgtccaacacgatggcgaacggccagggtaaaccccgctgcaatcccatttctgcgcatgttagcccgcgccagtacagctaccggtggccgccagatgatgccagccaccagagtcttaccatataacttgatttgcatgacatgctccacgcctatttcggtcatcttttaatctaccactataggcgtaatcatgaccacgatcacattatgattccttttaccctgacggctccctcccaagagctgattatccgggctacctaaaccactgcgatcactggtatctgactgttgctcgaaccctgataacaccagcgtttcacctgaatgcagccgcaccttctgactgaatgcgcgtaaatctatcgtcggcaactgcacctgaccggtctcttccttgccaaatttctccagcctctttaaatcgctcaagctaatgttgtactgcaacaatatttgcttatcagccatagcataaggcagcatcaacatattaaaacccgtcgtcactgttgcgggctcaatccccaccgaagtaccgacttgtggcgttgaagtattggaaatggatgcaacataaccggtctgagttgccacctgcatcggtactgcctgcaaattcaacgtagtcaccgaaggttgcgtcactatggatactttgccttgcgctgataacgccttaattagcaaagtgctgtcactgaatggtcctttgaggatatgaatattggtactgactccgccgtcatcaataacactattcccactctcattactcaatcctatacgagcacttttataagctagcgaccaatcgacaccatactgatcagcacgatcgaaagtcagattcaggatcttgacattaagcaccacctgcgtggtcagcaatttattctgttgatcaatgtaatccttaatcctatcgagtacttcgggcgaatcggttaccgccagcgatgctgtcgccattgatagcgttagcttaccttcccccggcgtcagcatggctgataccgttttttggatctcatccatcaccgaacgggtcaaagaagttgccagggtttgagtactaccgctattaccactatcgccctcacttacgccactgccgaacgtcgcactcgtcgtcgcggtcacgctggaagacaatgcatccgtacccggcaatgcatatatttgaaacacccgcgtctctgttttgaaaatatgcactgcaccattatgtactttccaatgcaaaccggacgacgaaacaaccgaatcgagcaaccccactagcgatccatgccaattcacatgaattttcaacacttccggctccccctctccagataccggcggtgtgcctgaattgaccaccacaacacctcgttcactccctctttcacccgatgccgaaccgggatagacagcaagccgggcatcggcgctgatcaccaccggtacaccgcaaatacgtttgatcttatctgcaaactcacccaaggtaattggctcagcttcctcaagggtcaaccggcaagagacggtttcactctccttcttcgaggggatctccttagttgacacccaataaccatgttcatgcacatgtaccgacattgcggcggcactattacgtaatcctttaataatctcagtcgcttgcgccatctcggtatctgcctgctgatcgaccttctcgattgctgcacaacctgacagtccagcggctacgcagggcaacaacaaccatctgtaaaacgtcaaaaactgaatagccatgttattacccctgagcctgtacatggacaagccgctgttcctgataaatatcgacgctgaaaggacgattcgccattgtgtaagcgtcgaacaacgcactcaccgcctgaatgaacgtgccactgaaacgcagattagcccggatcggaaaatcataggaggcatcccacaccacctcataaccggacctactggcccacacttgtataacatcacgcagcgtttgccccgacgttgctgtccacactaccgccagaggaaccgatgttggcactggtgtggcgtaaacggcgacatttgacagagagacaagcgccataaaaacagatgcgattaatttattcatcgatctttctccaaaggaaaatcagcagccaaacaacccattaatgggtcagtcacccaaagaaagcccgcttgcggaatagcaaccacaatatttccaccagctacaatatttccaccagcgccccgtcagaaacaaattcccgaacatcacccggtaatcgtctggcaagttggttttctatgcgttttcctttgccatcgataagccaagagccacgcttgaaaccgatttgatcgggttctgctccccatctcagcaattccgcgaaagccccgtgcaacaacacattgtcaccggcactgatatttttgcggaaaatatagacatgagcccctgaaataaatcccccccagagacattgactggaaaaattgtcacaccaagcatcggtgtttacccactccatatgcaaagtggttaatgcctgctgcatattccgacgcctgacctttccttgagcatgatgatcaagtaattgcacaccggctgaagcataactacgaaacagcgctgcgacatcggtcctggcacgcactgactgcacacgcacttcatgcaacaactgaccaaaaatcaattgcataaaaaacacaacgacaacgctaacaatcgctaatggccacattctcgttctcctgcaaatttaaaaacgtaaaaatccacccaccagaaaaatcaacattgaacacagccaatcatccgttccctataccctgtattccgtactctattttccgtcctctatctttccatactccgtcctctgccttctgtcctctgccctgcggcatctttccattgcaaaattgggataccaaaacccgcatgctggcaaatcaacaactctccctgtttactcatggatacactacctaacgctggacatcccccaccggcaaaactgcctgttttcgtacttatcaccaagttattaccaacaaccacgtttttatctgcatgaacatcaccggcagccaaggtgcctttcctcgcgggattagcattaccatccaaaataaacaacgtgccatgtgttggattaacaaccattgcaccatcattaccttgcgcgatataagattgtttttgctgaaaacgggaagcgaaagcgaccttattcaccccctcaaccataccggttccttgcatcgacagcgtatcgacctgatcaaggcgattgccactcatgttgatgctggtctccatcttattccactctggatgcccatctattttttgccgatgaagcaaatcaccggccaaagtaccgggaccataagttgatgcatctctaacaaatggggcgtaaaaaatacgcccaatttcagtaggttgttgattgaaaaaaccggcaaaagatttcggtacattgacctgaccataactgttccaataagtgactggattgttactgtcacgatcttggtaatcgagatagaggccgccaacgccaatcaattgcacgattttcattgcatgttccgccacatccggctgttttccgccttctattgctggaacggtataaatcagcggatcgatgcgttttttgccattaggcagcacaacgacacgtaatacgccatcatatttctgaccaagcggattgaccgtattttgatccaatccgggtggcaaataagggcgcatctccgcccaatggattggtgccgacgtgggcccatgagttaaagcggtgtaattattattgacataatccaccacggcatcgccgaggtgctggatttgcccggctaccacctgatttaccaacatgtcactctgcctattcagataaatcacaccaaccaccatcattgacgccagtaccatgagtgcaatcgtcacttccaacagagtgaaaccggcattacggcggcgtatcatcaatacagatacagacttaccatcatgcataaacagcccttcttatttataaagcagcaccacggctagctaccgatgacaaagcgcgacaattaatccagccactgccagacccggcccgaaaggtatctgtggtgttttaattctgcgtaaccaccgcattgccagataacttaccagcgtgaactccaccgccagcaaaatcacaactggaagcgcttccaaccccagccaggcaccgagcgccgccagaaacttggcatctcccatgcctaatgcatcgcgccgagtcaatcgccgggcgatccactcaaccagccggaaaaacagatacccacaaactgcgccaacgacagccaaaggcagcgcgacaaaaccggcggatggcaaattaaacagcaaccctagccataacaaagaaagtgtcagttgatcgggcagcagcagatattcgaaatcgactactgccagtacgaccaacatcgaactgagcactaaaaaccccaacaacgaataactccaccccaactccaaagccagtaaggaaaagagcaccgctactgcgccttcaaccagtggataacgtatagaaatcacacctttacagtatcgacagagccctttttggtgcaaatagctcaacaggggaataatatcgcgggccgctaacacgtggctgcaacgtggacaatgggaacggggaaaacagagattaaagctggcaacctcattattgatttcagagaaaatcatcatcggcaggcgacagatcaccacattaagaaaacttccgacgcacaaccctagcaaccctgatgccagcaccaaacacccagtagaagattgcaaccaccctatcatcatgatgatctcccggcagattcagcacacaacgattggataagggaaacaacaacagaaccagagaaaccagctacttccctcaccaagaaaatgcagcttgaaaagccttcactaagcttgccaagccacacgtcatatcaagacatcaatcaacgtcctaactggcagaaaccagcgtcacggtattcgcatcattggcattacatgccgcttcaatttgcgccaaagtcgaatctgatttaatttccgtggctgactgttgccctttcccacctccaccacccacggtcattttcgaccaacccgccactcgcaatttcagcgaaagttgctggcaagcctcatcaggcacattttgatactcaatcttaaaagtctgagcggtggtatctcccggagaaatggttaccttgccattccaactattaaaaataatcccggacttaccatcctgagtcatattggtcggcaccactttgtaattaatagcaattttgttatccaaactgtcatagcctttggcaccatttttaattgacttcaaatttgcggccatctgagtaatattcgacgattcggttgagatttccgaagcccgaaacaacttaccaatccccgcggcggcggcggctaatatcacaataccaacaatcatcacaactaatgcttcaatcagcgtaaaacctaattgacgcttggcaccacgcaatacattgactttcttattcatgctgataactccaaaatcgaaaaatagatgtgttacaactcgttattaagaacttttgccgatgaatcactcacatacttacaaaagaaataaaacatttacgttatgatttcgttgataaaaatatttataaaactttaatgtttcattatgaaattaatactataagttatcatttagaaaataaaattgtttaaatcgttcaaaaatcacgcaattgatcgataaaaactatcaaatttattaatttagatcgcaaacatcgattaaaactaatgatacagctcattaaaaaatcaatggattttattctgccaatcagcggaaaataacaattgataaatattttttatatataaaattagcttgttgttaagacttactgttgtaccaagctgtcacagatcacattttcgtaaaaataggacatacaacagcgttctttgctaaagaaaaacacctttcaataaccaaggcttttttaaatgccgacaaagaatttttgctagttatttattgagaaaggaatagagaatttaagcttcaatgaaacaaaatcaactctaagccgatatcttaaatcggagagtgtggttctttgacttgacaaaactataataagtaaaaaaccacctccattaggaggtggtgcagtttaatactgacaattaaaaagatcaatttgctatcgatacctttctttgcaggttattatcaccgactaaaatgccgccagcaaaaagcaaagcatcttcaagtaacaattcacttttatcatctgttttttctaacacgaaattatatacgtttaatggatcagtgtttcttaatttaactgagctaagggtagtttgaccatcacgtgtatatattgtatcaccgatcttaagttcatcagctttgactattcctcgtaatgttgcaacaggatgcgttggagtcagtgaaactttttcatcgttattataaattaaatcaacaaattcagtatcgtgacctacaatacggcttttcacttgtaatacaccaccttgctttgttagaactttatcgcctgaacgtatatcttcaaccttcttcttagaaccatcagccatatctattaatgtaccttcagcaatacaaccatattggatgttaatgggtgggtaaatgaattgtaaatcagacggagtacttccgcccttattagtataagtgaattgaataggatatgcttgcttatcagtctcatcaggagttgtgagaatactagcctgtaaatccaatacatacctctcgttattcttccagcatattgacccaaaattagcgtaacctgagcctttggagaaatcccatgtcaatcttttaccgctttcatcaaccgtcacatgttcccaaaatatatttttatcaatttctcttgctttacatccaccaccagtatcaaggccaaccagcgtcaaatccgcgcctattggtaatctcttggttcccttaggctttctattctcatcaatcaggatatagtcatcgaattcaacactgccaatgatttccatgttgatatgtgtattactatatggtatctctggcgtcattggaccataatcgcaagcatcgggagctccgcgttcaggatttgatctatttaagcaaacgattattgggcgcatatgctgtaaatactccttataaccagggtccgtgttacatatcttcttttttacataatcaggtgcattaggtgacgtgttacacatctcttttggaacatcgtcgaaataaagtatatttgatttcatgataattggcccgtcactgagacttattccatttatttttccctgatatgttgcaacagcgataacagaagattgattaggattattaataccatcaagtatatcttcttcagaaacggcttccgttgtatggctccgtacttccttaccctctatactgcttgaacctgatgcgattacctgtctagattttttatctttatcaagtgcaaaaaccacaagtgagtcttggaacgatgaaggaagggaaggatcaggatagtaaagagaattaaaaactgtagctgaaattgatttataatctttagaaggtatgattacaggctgcccgaaaaaattctcaggatctttattcgagcgatgtatttcaagcgatttcccactcttaatcagtgcatgttgctttgcttttatcgtctcaatatctttaaaaacatcaggatgcttctgttcagtaataccactgtagcgtaacagtgctctatagcccccctcatgtgaaggaatagttaaattgatcactttaggtttattaggtgtcttaatgctttctaaaagttcagatatagccttattatcctctatagataacgtatccagtttcgtatcagcaaggcatgagattataggggtgagcagtatggtaaaaaaaataaatattcttttgtatagagtcataatttttcctatgaagtaataaaaatttcttaagtcagaaacattacacaaactttatttaaaatcgctatttattgaacttaactgataggtaactattaatattatctcttgaaattattaattaaagggaaagtatattaaaaccaaaaccacatatataattaatagtcacttataataaaacatcaagatttttatattttctttctttatgaaaaatttttagcgtaaatatctactgggatgtgtattcaaacattgagtaagtgttattaactttaagcacagcagacatcccaataaaagtttactccagataattaactcatcataaatttcttccttcatagtgaaataaaaaagtcacaggtacttaatatcacccactgttttcaataatcagacttaatctattccaaactaaaataatgaaaaacttgctatgagcatataaaaatgtcggttctgtaacattattaaaaaatccatcttgaatcactttattaattaatgataagaataaaataaaaattatttccacaaaccaaaaaatatccatcatgaataataacctttaaaaatcaggttattgcggtagccatacccatattttcaatgctagtaaaaaaacgatagagcttttcttagattttaaacatcaataactaataaaggaagaatcatggctataactccagaacaaatcgctgttgaatatcccattcctacttatcggtttgttgtttcagtcggtgacgaacaaatcccatttaacaacgtttccgggcttgatgttcattatgatgtcatcgaatataaagatggcatcggtaattactataaaatgccgggccaacgtcaatcgatcaatattaccctgcgtaagggggtcttccctggcgacaccaaactgtttgactggattaattctattcaacttaatcaagttgagaagaaagatattgcaattagcctgaccaatgaagctggcaccgaaatcttaatgacctggaacgtggcgaatgcattcccaacgtcattcacctccccctcttttgatgccaccagcaatgaaatcgctgttcaggaaatagcactgacagcagatcgtgtaaccattcaagcagcttaataaggagagattttatgaccacaataacaacctaccccggtgtttatattgaagaagacgcttcgctgtcactctccgttagttccagtgcaacagcagtgcctgtttttgctgtcgcaggtgacaatccattaatatcaggtaaaccctatattcgcattagtaactggctggaatatctgacactaaaaaatgaacaatttgatcctgccaatacacttgatatctcactgcgcgcttattttattaacggtggtggatattgctatctggtccaaaccacagatttagaaaaacaagttccaaagctggatgatgtcacattgctggttgctgccggagagaatattactactgctgtaagtacactttgcaaaccgggcaaaggtttatttgctatttttgatggtcctaccacagagttaaaatccgatggcacatccaacagcgattatgacccaaatccttttgctgccgtttactacccctggttaaccgccgattggactactactatcgatattcccccaagtgctgctattgctggtgtctattgctctgtcgatagcacccgtggcgtgtggaaagcaccggctaatgtccctattcaagggggattacaacctaaatatccggtaaccgatgacctgcaagcacaatacaaccaaggtaaagcactaaatatgatccgcacctttcctaagagcggcacactggtatggggcgctcgtactcttgaggacaacgataactggcgttatatccctgttcgacgcctgtttaacagcgcggaacgggacattaaaaacgccatgagcttcgcggtgtttgaacccaacagccaaccaacttgggaacgggtacgcagtgccgtcaataactatctgtatagtttgtggcagcaaggtggtttagcgggaaataaaccagatgacgcttactttgttcaaattggcaaagatatcaccatgaccgatgacgatatcaaacagggaaaaatgatcatcaaaatcggtatggcagcggttcgtccagcagagttcattatcttgcagtttacacagaacaccgctcaataattggaggcaacatgccaacaataccaacttatcctggtgtctatattgaagaagatgcgtcattaaacctttctgttaatcaggggaacacggcaatacccgtttttattggcttgttttcgccaaaaaacaccaacctaaaatcacaagtaacacgcgttaatagctggctggattttactaatctgttcaatgcgggttgtattgcaccaatcacaattaaatcaacaaaacgggcttcaatgcctgccccaactcttttagagaacgttaaaggtgatacagcagttgttgctactcctggtatctctgttgatgcagacaataaagatcccacttacacttacaaggtaatagttaactacacgaccagtagtgatgccctaaaactttatttccaaaatggtggcgggccttgttatatcctgccacaactagataggttaactcagggatttctggactcaatccctgagttaattaagcaggctttagaaattaccttgatcgtctgccctgaatgggattctggttaccagagcaaaatatataacagtctgacatcttcattattaaatgccggctatttccttatcgctgacaaccaggataaaaacactgcactcattactgaagtagcatcacaaactgcgacgtattatccggcagttaaagtctcacaacttatccaagcagaagatagccagatagcagtatcaggttatgaagatgcaaaaacaaaatccgatgaagtcaaaaacctggcgcaactcaaagagaaaaacccaactgtctaccaacaagcggttcaagcaatacaggacgaaatagccgccaacggcaacatcattcctgtcagtgctgtcatggctggcatatattgtgccactgatgccagccgtggcgtctggaaagcgccagctaatgttgtactgagtgggatcagtgatgtggccgaacggcttactgatgatgaacaaggagagatgaattccaaaggcatcaacgctattcgctatttcagccacaaaggttttgtcgtatggggcgctcgtactctgcaaaacgatgacaactggcgttacattcccgttaggcgtctctttaatgcggcagaacgggatatcaagcaggccatgcaatccgttgtctttgaacccaatagccaacccacctgggaacgcgtgaagtcagccattgacaactatctttattccttatggcaacaaggggcattagcgggaaataaacctcaagaagcctacttcgttcagataggtaaagatgtcaccatgtctgacgacgacattaaacaagggaaaatgattgtcaaagtgggcatggccgcggtacgtccagctgaatttattatccttcagttttcacaacaggtagcacagtaatcgtactgaggcgcggttaaacaccgcgtctattcagtcgttaaggagatgataatggagataacacagccgagcgtcaccatcacagaaaatctgatattcccaaagcaaaatgactcgtttatcggtataccggtttttatcggttatacctcatcgccggtcgataaaaccgctatcaagctccacagcctggccgatttcgcccggtcatttcctgagtcaggattaatgtactattccgtgcgccatttctttgaaaacggcggtcagcaagcttatgtgctgtcactgggtacggagcaacaattaagcgatttttcgtcattaatcactgcgctgcaacaagcgtggctggcacaaacgattgccgcagagaacgacattaccctgattatcaccccagatgttatccgctttgatcagacagaaatctccgatactcaacgcgatctctggttacaactttggcaatcggtgctcaatctttgcaagagccggcgcggtatcatggggttattggatgccccagacgatcccacattagccgctaagtgtttacaacagttttcttccgctgatcgacaatggggcgtcgtatactggccgctgctaaaaagtgcctatcaggataatacacaaaaccctatcgtgctttcaccaaccgccgcagtggctgccgtcatccagcgtaacgataaccaacaaggcgtctggaccgcaccggccaacatcgcgttaagcaaagtgatcagcccggtacgcgcttatatcgaagcgaatgccctgtttaacccggatggcacctcactgaatctggtccgcagctttcccggcaaaggcatcaggatctggggatgccgaacgttggaaaatacccacgactccccctggagttatattcagacccgccgtctggtttcctatatcgaagcttatatgactcaacttggccgagccttcgtctttgaacccaacaacgctatcacctggatgaaattcaaaggtcaagcccacaactggctacgtcagttatggctaaagggtgggctacggggcacccaagaagatcaagcatttgaagtattactgggcgttgacgaatcaatgagagaagcggatctgcgggccggaaagatgatcatcaagatcagactggccgtgttaattccggcggaattcattgagctgaatctgacatttgatactcgtaccggtaccatacctagctaaacaggggcaaaatatgcataacctctataccccgtcagtatcacaccgttttatcgccagttttctgtttaacaatatccctagcccactggatattgcctttcagcggatatcgggcctgagccgcgaactgcaaacgacccaatacagtcaaggtggagaaaacgccagaaatgtctggctggccgaaaaaatccagcatggcagtctgcatctggaacgcggcgtcatgacggtgacaccactcactctgatgtttgatcgcgtcctgcggggcgaaaaagcggtttatgccgatgtcgtcatcatgctgctgaatgaaaattcagtccccgtggcaagctggacgctaagtaacgccctgccggttcgttggtccactggcgactttgatgccaatagcaatgccgtcttggtgaattccctagaattacgttatcaggatatgcgctggttaggagtgaaagtatgactgtcgaaattaaagaattgattattcaggcaaaagttaccgattccgcaagtgacttattgtccccgcgaacattagcccaggaggcgctggataatgcccgtctgattgagatggtaaaacaggaggtgttagacgcattgcgtgaagcaggaggccgttatgagcttaattgaacgcggcttgtccaaactcaccctgactgccttcaaagaccgggaggggaaaatttccgtgggaagtttacaggcgatgtataaccccgatgccattcaactcgattatcaaacccattatcaacaggataaaagtgttaaccataccagaaaaagtagtcactatgtgtcatcgccaccggctggcttgtcattagtcctgctgtttgatgcttccatgccaggcaataatatcccagtagaaacacaactgacgaccctgaaagccttatgcgccgttgatgccagcacccatgtgccccacttcctgaaaatcaaatggggcaaaatgcgctgggaaaacaaaagctatttcgctggccgggccagtggccttaccattaattacaccctgtttgaccgggacgccaccccactgcgagccagtgccactttatctttggttgcagacgaaagctttgttattcaggctactgagcagcagttaaaatcaccaccggtcaccacaatcagtgtgacagatatgctcaccctgccgttgattgccttaggcgctggcgcttctctggcaagcgacattgattatctctcccttgcctggcaaaacgatctggataatcttgatgacttcaccccagggcaaacactgcaagcacaggagaaggcatgaaaatacctgagataaccatcaagataagcggcaaaaccctcaatcaatttacggctatcaacctgacagtaaaccactacatcaatggtattccctcggttaacatcactctgggtatcgccggcgatgctaactatatttttgatgccaaagcacaggctgaactggcaaactgccgccccaataatgaacttattgtacagatccaaaaaaccatattgtttaaagggatcattgttcggcaagcacttaagttcaaaggccaggatagcctgatgaccttgacggcaaaacatccattgcaaaaattaacagatggcctccactcacagctattcagcaaacaaagtgatgaagcgattatcaagaagctattcagtcaggccggtatacaaacgacgataaaacaggcccctcagctcaaaaccgtgcatgagcaaatggtgcaatttcgctgtaatgactggacattcttaaaaagccgacttatcgccactaatacctggctgctgcccggcaatgaagtcgttacactgataacacctaaagcgctgaatcaatcaactgtacatacgatccatcagagcaccaacgatcaggacattgtactgtttgaagcaaacttgcaatgggataaccagcgcagccccaaaacggtcagtgtacagtcctgggacattacccaacaaaaactgtctcagacaattcaggtgaagaatagtgggcttggcagtaataaactagcggtagacagcataactacactgaccaataaagactggcaatgggtttttaactatccactggataatgagcaagctaaatatcttgctcaaggcattatggataacctgcgaagtgataacgtctccggtagttttgaagtcgaaggtgatagctgctatcagccgggtgatgtcctcgcgctgaatggctttggtcaggggatggatggtcaagggattatcaccggcgtgagccagataattaatcagcgtcaaggctggcgtacccggttaaccttaggtatgccgccagatgcagaacaggcagttcctccggttaaagagttgcatgttggtattgttgaaaaataccaaccagacagccagtcactgggacgtattccggtcaagataccggcgttaaacttaaccaacagtgtactttttgcccgcctgggtaagccttatgccagccatgaaagcggattttgcttctaccctgaaccaggagatgaggtgattatcggtttcttcgaatgcgatccgcgcttcccggtgatattaggttccatgcacaacccgaaaaataaagctccggtagaacccagtgaaaaaaacccaatgaaaaccttagtcatcaaacaaggagatcatcaacaggccttagtgttcaataatcaagataaaactgtcgcgctcaatagcggaaaaaacacgttatctctgcaacaagataaagatatcacgcttaattcagctaacaacctcatcaccaatgctcaggaaattaaaatacaggccgaaaaatccctgtccgcctcaggaaaatcgggggtagatattaaaggagcaaagattaacttaacacaataataaggcaatgaaatgacaaacaaaatattagccgatatttatggtcggggctgggcatttccgccacagttttttataggtgaacgtattccttatgaagattatagtagtgatctgaataaatatctgagtgaaaaaaaaatcgaagctgaacagatagtgaaaatccaagcttgtataaaagagagtgtaatgtgctacgacttccacgcaaaaatcacatctactcaggtaagtaagcaaacaaatttacctaatcccctgaatatattggttacctataccttaggagacagcgaaatcagccaaaaaattcaaggtgtccttcgtgttagccaagatgatccgccacagttttctataaaagacaactctcggactggcatagcaatagcagaaggcacccaaaatgttctccagagtataaatattctttttctgacggaacccggtgaacgaattatgcgtgaagactacggctgtggtctgaatgattacctgtttgccaatatcagtgatgaattgatgacagacattcaaacccatattgaagaacgggtattacgctatgaaccacgcgcagaaattacctcgattcaagtgaaccagagaacaaacttgcccagcactctacatgttcaggttacctatgcgttgagaggcagcgacatcaaccaacagattgaaggcgtccttgaggttaatgaaggccgggtacaggtgagcttatgagtaaacaactggtgattgatggcgacaacctgctattcgaaccattgtttggcaaccggcaagtcacaattctgggacctgcgaccattcgaggcagcggacacgccaaaatccaaggcaaaaaaatcgttattgtgggtgacgaaaaaaaagtacagcttcaagcgcaatatattacccctagccatccgatacctggcatgggcatagtcaccattgcccagttagacgcgaaccagcaggtaaacttttgtcgtactcccgccacggcaattgttgtcgggcaacaatttatcgcccgttttaccccgacccaacctgctaataatccgtcaactggcccagatgtgacaacgccgagtatgggcaaaggccgctttattgccagccaatatgcggtcagtgccgggtaaataacctcttcaaccctatttttaaataacaggtggaataaatatgggacaagccgagttagataataaactctctgctattgtgccagatactgtatttaaacttgatgaaagaagtacactggatattttaaactggcttaaagcttatgctgaaaaaatccctttcgatcaagataaaaatcaattctgggatagtttttactttattcaggaaaatactcctgaagaattagaggatatttaccaacatgctaataaagcagatggccttttaccgccacatcaagcttttgtttttgcttttttaaagttattagaaacatccaaccgattattaaataccttcccggcccgacaccgcgatctttattaccgggaattactgggactaagccccagaaaagcccaagcggatagcgttgctttaggcattaccttaaatacagataacgcagaatatcttatccctaaaggaaccctgtttgatgccgggcaggatagcgtcggcaacccattacaatatacatcagaaacagatttactagcgaatcaaggggaactgaccgacctgcgttggtatcggaaagataaggatagctggcaatcgacaatacctcttagcctctcagataacattgcattacctgaaaatggtattcaactttttagcccgacagccaatgatgtggcagtgctatccggttatctgattaaatcatctttattttctatgcccgaaggagaacgccatatcacattgacgctggaaaacgattgggaaggtcaagctgaacatctcaccgctaaaatcagtacaggagatcactggttatcgttgtcggtaaatcctaatcgtactaacaaaaacactattgagcttgaattatcatccactgatgatcctatcagcccgccagataatcttgatggcatgacattcgacataccggtattaaaactaggcactactcagaaacccatgttgcccaaaattaccgggattgaaatcaatattaacggcaaccgcagtgtgcgctatgcctctgatggtggtatcgaacagacggataccaccagctcccccttcggtcaatcaccatcactgggttctggttttaatctggttgccccagaatggtatggcactgaaaacgcaacattgacgatgactcctcaatgggttggcttaccgacaagcagtttttcaacatggtatgacaaatataatccgaaacctgccagtaatggggtgttcaaagtacaaggttacttagtcacatctcaaaagagagacgttcttaatgatgctaaatctcagccattatttgatggaacaggtgccccacaagggcaaagcctgacatttatcttgccagcaatgcattatcccctcacagacagcccatcgcccaacgaatggcctgcatccgtgcgcatagaattggccgaacaggattttatgcacgcccagtactggcaaaatcccacggataaaaatgttccttatacaccacaaatcagtgcattgcagattcaattcagcactacagctaaacctgaacaattcaccgtttacccgctgacgccttttggttgggcaaacacaaacgaagatcccccttcattcactaacgacgcactctatttgggtttcactaatgtgttaccgggacaaactttatcgctatattggcagttagagggctttaaagcgctcaacttatcctggttttatctcaatcagagcaacacttggggttcattggatcagctagttgacgaccagacccataacctgtttgaccaaggtacctggcgcacactactgccacaggacgcgtcaaatcaggcaactctgatgccaacaggacgatactggctgaaagcagaaataacccatcaggctgaatctcaggattacccaaaaattaaaggcatactgtacaacgccgccacagctaccttaatcaatgcagaactcgttgaaactgaccactttatcaatggattacccgccgacagtattacacaaccggtcaatgcgttagttgctatcgatagtatcaatcagccttgggtatcctggaacggccgcccggaagagacagaacaagcctttctgacacgggtttctgcccggttgtcccaccgtaaccgggtactgagctgggataacattgtcactttattgaaagaacaattcgtcagcttatttgatgttaaatacccttctgccagtgagttaactaaaatcccggcacagaaagaacaacaactgattgcgatccccgacagtcgctacaaagataacgatgatgcgctacgcccgattctgaatccggcccgactggcggaaatggtcgactggataagccaactcagcagtccctggaccaccctcaaaatcaacaacccgacctacgttgacgtgctgatcagctatcaactggtgtttgtcacagggattaatcccgactacggccgtcatcagttacaacaggaactcagtcgaaaatatatgccgtgggcagaagatagcgctatcggcgtcacaaccggtaatcgcattgattactacccattattagccacgattcagcagtcacctttagttgaacgagtcaccaacttaacgttgaaaaaatcgtcccaaaccgcaggagcagtcggcgacagtgtagaagctgctgataatgaagtactgattttggtttggtcagaaaatagttccactaataaaggagcagacagtgaataatcaagacgccctgtttcccatcgttaaagacgatatcgcctttgagaccttactcactcaagctaagacggtcattgagcaacagtctgggcaactctggagcaataccgaagaaaatgatcccggtattaccttattagaagcctgttgttacggcgcatctgatctcgcctatcgccattcgctacccctgcgcgatttgcttacccccgaaaaacaagagcagacactgggtgatggcatttttccacaggaattcggcccacaacaaatgctgacctgtggcccgatcactgcggaagattatcgccgggctttactggacttacatagcagcgacaccgacaatgaaacaagtgaagattattttttctttaacgatgtacggcttatttgcgaacctgaaagtgaacgttataagtactggtataacaaagaaagccgtgaatacagttttattcaagaacaagaacaagaacaagaacaagaacaattacagttaacactaagaggaaactattggctttatttacttcccaaccgggaaacggaagatgataaaacactgactcagaaaaggctcaatgatttcctaaaagataaccgtaatctgggggaatccgtcagtaaaattatctggctgcaacccgtggatttcttattgcagcttgatattgaacttgatgatgatgtcagtgatcttgctgatatatttgcccaagtttatatgacaacggaacaaatggtgcttacaagcccattacgctatagcacccaagctatgattgaacaaggttacagtaatgaagagatatttgaaggcccttatttacatcacggttggataccggaattatcggcggctaaagattacaccaagccgacagaattaaagctcagccatctggctaatcgtttactggctattcccggagtacaaaatattacccgattggcattaggcaagcatgatgaaaacatttctccgctggcggacgatagttggtcctggacaatcgctcaaggatactatcccaggctatggggtaacgatcccttagacttaatttcctcatcagcaagcccactcactattaccgccaaaggcggagtaaaaatcactgtttctaaacaagatatagagaacaaaatcattgcagaacccttgattgaaacacagcccgaattactaaactggggcaaacatcgtaaagtcctggattactatccagtcagcaataagttacctgcctgctatggattacagacctatgcggagactcaacaacaagtgcacttgcaccaatttatgttgccttttgagcaaatgctggctaatggctgtgctgaactcgctctcttgccgaaactgttagcatttaaacaacggggaaatacggtatacggtacacaatggccttttaaagcgaatactgtcggtcagcaagtccatcaggaaatcatgcccgatttaatcaaacaactaaataatgattcccaaattaacagtgatgacggtatccattcacaaaattacacaaaagaactatcaatcctgaattacttattggaatattttggtacccatcgtgcggccagaccactcactctggattcactggattttctctctactcaacgtggctatttggcacagcaacccgaattaacctatcaacgtaataacattcgtattgataaagtatcagcgcttcagaaacgtattgctgcccggcttggtttgggaggaaagtgtttcgaggaaacctcaaagctggatgaacttcctttctacctgattgaacatcgacagttattaccggtaaaacctgacacgaaattcgacaaggagcaaaaacccgataagctgaaaataaaaagcgtacccaattctaaaaaccaacaattaatcattacccaaaatgggacaacgggccagctattgtatggtcaggtcattaatctaattattaaagaaaaagaaaatcaagatattagagtaaaattcatattacgaggccaaatgatcacagatattacaggagagtcatttattcttgacacccgtaatagcacggctttagcacgtagtttgatcgacgtacagaacgcatataatgacggtaatctatactggtgtaatagcccggtatggatggaagatatggattatcaactggtttatgccagtgagatatatcaaacgggaacagaaaatgaacgctggattacctccagcccccaaagtcccttccctgccatgatcgaagaaaatgatgaaattacactgaaatatgtaattaccccatccgggccgaagaaatctgatcatgaactcaaggcaaacgtcattaaatttgatcgtattcaaggcaagatattaattaaactcacccaggactcacaggataattttccattagcggcagacgcctggcgctatcgttggtatttctccagcgaaaaatatgctttagctgatcgcttttcatttgtagtcagtatggtgattaatagccaactcgttaaaaatgacgacgttgatccttaccaattggaancttgggcgaaaaccgaaattttggctgaatttcccgctcatctttccatgattatccactggctgtcaccggaagattttaaagattttgtcagtacctatcaacgctggcaaaataatggcgctcccttaggggacgaggcataccatgttttagaaactttaaccctgggaagattaccttctgccgcaacaggtattggtaatatgagaattgctaccgcacagcaacgtattggtgtggttggtgaatccggtaaagaatggaatacagaagtgattattagtaatcagttagtgtatgtaccttatactggagaaaatttaaataaacgctgactttaatcatgaatatagaaaaatatcgattaaaaacgctcatgtttaattttcaaatgataaagaaattaatttactttaacaaaataaatattaaccttacattaaatcaagtatcttttttaattttcatttaattataatgaaaaactcataatcatttcacattatacaaaaggtgatataaatggaaaaagaacataatccatataattcagaaaccaatttagaaaccaatttagaaaataccaatattaaatcaacgggtccttcagccgatgatttaaaaagccgttttaaagaaggcagtattccattacaaaccgattatgccgacttgattgatattgcggatattggccgccgggctgtaggcaaagcaccagatcaaactaataatccaaattcagcgttggaactagatgacaactctgggctaaaaataaaaattaactccaccggcggtttaaaagcagatcaagacggattaagtgtaaaacttaaggataaaagcttattagctgaccctaacggattagcagtcaatgccggtagaggggtaaaaattaataacgatcagcttgaagtcgatggttatcatggtattgaaatagttaacgaaggtgtaaaagttaaagcaagtaatgggattaatgttaatagcgatggtgtttcagttaaagcgggtaatggcatttctgttagtggaaagggagtggaagttaaggctaaagataaaggtagtatttccgttgattcggatggtatagctgttaagtattgggatggtggaggtattgtagcaactgataattccggtctctatttgaaattagaagggggaaatacaaacaatggttggagtggtgtaagtggtttgagcctgagtaaaaatggtgtaaaagtcaaagcgggtaacggtatcacggttgattcaagcggcgtcagtattgatcccaaaacagtactccctaaaggaatgattgtgatgttttctggtagtagtgctcctactggatgggctttttgtgatggtaatcatggaaccccagacttaagaagccgttttgtcatgtgcagtgaaactatttctgaaacagggaaaagcagtaataaagctagtgggagtggaaatggaaaaaactattccagaaatacaacatcaacgacggtttctgttagtgttactgtgaaaaatacgacattaacagaatcacaaataccttatcattaccatattggaggtatgggttattggactaataagggaatgaaatatggtaccgaatattacagcgagtatgcttcatatatacgtaatgatctggatagtgtaatgcaatcagccaatggcgcgagatacgcatacacatcaccctcaggaggaggacaaggacataatcacccagcaacagcatcatccccttcacatgatcatagcgttaatgtaattccaccttattacttattagcctttattatgaaactttaattctattctacaaatacagatttaaattacctattatttactcattaccaaggaaatatcaatatgacttcggagccaaatctgttaaatcggattaccattactattgaggctaacaatcagcaggtagctaagaaagtattgcatggctccctgcttaatcaagccaatataaataacttattcaatacattattcactcaatatcctattaataaggatatctatttagaaacattaaccttggatcttggcgaaataaattttcacgactttaattcattgtttcctgctcgcctcaaggttgcactgattaaagcactaagccaatatcagataaataataaggaagaaattcacctgaatgcaccaataccaaataaaatcacccataattcttctttatctggtgataataactttattaatgcagagaatttcattcacttcttatatcaaaaagatccccaattaaatccagcggaggcaatagcgaataataaaaacagtgatatcaagattaagaaattaataaatcaattaacacgaatagacaacaaatcagcattactattagcaaaaagctgtttatctgaacatagcctgcaacggcttttaactatcaaacaacccgctttattgagcgccatcaaccgcagattatccgaaaacataaataaaccacaacaccaagaggcgcttgcctcctccgggcaactgatactcaatgcactggaatatatacagcgacataatgcacaggaactagttaaacccgatgcaaaaatcatctcgcgtattacaactgagctcaataacggtacacttaatgccgcgtctgttattacattatttcgccaggctatgaccgacaatatcccattaaatagttggctaaaacaactctggcaaacagttgctatttcacagctttgccaacagcacctgtcggttgaagaacaccaatatctattggcatgctttataccaaaccacacggataaaaatagatctgagataaaaccctccatgggtggcgataactcttcaaacgatcagaaatatcaacatccgacaaatcaaaaagtaattgccgaagatccgcaagcattatcaatatcagataacccatcggttattagaggaaataacctcaacccacttcaaaccatcaacaaaccatactctgaacagactttattacctgaacacctttttccacgcccagtaaataatgccgggatattaattttgtggccgatgctacccgcactgtttaatcaacttggcctgctcgaagcacagaaatttatccatcatcaggctcagttcaatgccgttgatttacttgactacctgatttggggcaccgaagagagaccagcagaaagaaaagtactgaataacgttctgtgtggattaatggccgacgaaatgattgaattaactcctgttgagccggaaaaacagttgataatagatcaatggctggatgccgttatcagccaacttcccggctggaaaaaattaagccgtaatgatgtccgtcaactgtttttacaacgaccgggtgaattactggcagacgagcaagaaatcaaaatctccatccagcatcagccatttgatgcgctgttggctgattggccgtggccattaaatatcgccaaacttccctggctggatcgccctttaaagattgactggaaaaatatttagaaggtttatatggattacccgctgataaataaccacgatataacggcaaaatcacactggatttatccccatttagaacgtatcgatttgcggttacagcattactattatcaaaaatgtgataaatacgattccttaccggaaagttttttactcgcagaagataaattagaacaacgtctggcaagaccacagggcattccccattggctaactaaaccagatgatattatcagccacccagcagcaaaggaaaatactgtccctgatgcattgtcattattagtcgaacgtttcgaactgactgaatttgaacgggataccttgttattaggtttattgccgcattttgacagccgttatcatgcactatttgctgctctcaatggtaacagtaaaaaacagtggccgagttttgctttagcgattgaattatttagccaatgtcaaagtgatcgacaattactgcaaaacagttttttaccgcaaacaccattaatcaacaaccaactactacggcttaataatcaagaagaaccaatctggttacaaacacaatttttaactcataactcggtatggcattttttatcggggcaacgagttattctaccgccattaataacctgtgctaattggcatactccagccccacataattggtatccgcaaactctttatcattcatttaagaaaatattattgaatgacaccaacgaaatacagccattaatcatactcagaggaaaacaggacagcgccagagaattagcagtcagtaatattatggcatctcatggcatcaataccttaacgcttgatttagcccttctgccagatgacgagaacccaacggaaataactcacttgctagcggatacaatccgagaaacccggctacataacgcttgtttattaattcgcaatttttctttgcttacagaggcaaagaaaatattacatcgcaatttatctattttgttgaatcagccgaaattacgtgtggtttgcttggcagagccgggagatatattagtctggattaagcaccaaccaatggtacaaattaatatgcccattgcgacattggcggataagcaaaccttgctaaaagcaagcttaccggagaatatcgcgcaaaaaattaatattactcggctttgtcagcgcttctcttttaccgcggaaacattaccactcattgttgaagaagcacatcaataccaaatgattcggcaaccagaaggccagctggaagaaactgatttacgtaaggcattaagtttccgtgctcaacaaaattttggtaaattagcccaacgaatcaccccaaaacgcagttttagcgatttagtggtttcagatatgttagcgcaacagttaaaagagatcgtcgcagccattaattaccgtgaccaaattctaagcgctggatttcaggaaaaaatcagctacggtaccggtattagcgcgctattttacggtgaatcaggtaccggcaaaacaatggccgcagaagtgattgccgggtatcttggcgtcgatttaattaaagtagatctctcaaccgtagtgaataaatatattggcgaaacggaaaaaaatatctcccgtattttcgatctggccgaagccgattccggggtactatttttcgatgaagccgatgctttatttggcaaacgcagtgaaactaaagatgcccaagacagacatgccaatattgaagtttcttatctgctacaacgactagaaaattatccgggattagtgattttagccaccaataaccgtagccaccttgacagcgcgtttaatcgccgctttacttttattactcgttttacttaccctgatgaaaaattacgtaaaaaaatgtggcaaaaaatctggccggaacaattgacactatccaatgaaattgacttttcccatctggctaaacgggctgatttaaccggggctaatatcaggaatattgctttattgtcatcaatattatcagcagatgataactgtcaacaaatcgaaaataaacatatagaacgagccgtgatacttgaattaaataaaacgggacggctagctttttaaaaacttagtagaattggagtcaacatgacaatcataattgcttctgataacgcgattatcgaaattaatcaagcattaaataccattttatcccaatatttaaatattactggtcagaatattgatattcgttttgatctacccgaaattaattccattcaatcagaaccgacggtcagtgtatttctttatgagatacatgaagatctacaattacgttctgccgaatcaagacgttataacccatcaactaacacattattaccgggatgggtcaatatcaattgtaactatttaattacctactgggatgccagtaagccctccagtgacagctccagcccagacagccaacccaataatcaagcggcacaagtgatgactcgcattttaaatgcattaattaacaaccgtcaattaaccggtcttcccggtgcctataccagaattattccacaacaagaaaacctaaacagtctgggtaatttctggcaagctctcggtaatcgtcctcgcctttctttactttattccattactgtacctatgaaattgaaaaatattgaagacaatgtaatcccagtcagtaaaatatccgcttctgtggaccaaaaacccaatctggataactcacaaataaaccaggctttaatagataaattatgtgtagaattaggcggtacagaagatgtacgtcttgccttggctaaagtgaatctgacaaccaaacctgatacagaaaataatcaaaatcaggaaaatgaaagtgttattgttgaagtttcgggtattactagcgtaacttatttaccacaaataaaagatacacttaccaaatggaaaagcagtcaagaggctattgttaagataaatggtgttagcattgttgtttctaaagaaaatgctgataagctaattgggatttaaacttaatttttatactaaaataacaaacaatcattcacctaataaataattatataggataaggcgatctctctaaaattcatgaaaaaatcaaaaaagtattgaaaaaagaagacacagaaccattggaacttataggcgttactgttgaaggaataatcgaggaaatgaaaaaaactgatgaaaaatatggacaatatgaatacaaagatgaagatataacgagttatcctatagcttggacgaatcctgataatggaaaaatttatataggaataaattctccagaatactcgcatttgaataataaaggagaatctgagctcaatttggcaaaaataatatctacaataattcatgaaagccttcatgcgtcatcacatcagcataaaggcttacagtctcaaactgatacaggagcagacaacctaaactatgatgaatatgtgacagactattttgcaagagagttttataaacaaatattacccgatanagactatgtgcccaattgttttactaagggattaggcggtgaaaataaaatatggggaggaaacattgttgaatttatgattcaataaaaacatgcctctttggaagaaataagataagcttatacagaaggtaaaccatttaataaactagatggtaaattactagaggattggaaaaaatatgaaaaattggggaaaaatacctgacctacctaatcaaaattaatggatgaagttatctcagtcagattaattatagagtcttaataaataaaaaaacaatctctcatatgaatattgaagtacaaaatatccagtgagttatttaaaagaataccaatctatttattttcatagtcatgcatattgcacttgccatgctaaatcttgcaatatatttattaaaataatcataaggtgataacatgttcagcacatattctagtaaaaatgacaaccaaacaataaataaaataaacacagaagaaaaacatgaaaacacagaaaccgataatcacttggaaataaacttagagcatacagggaaaagtaaaccggatatagaaccaaaagatgtcactacaggtaccattaatgcaggtactcttctatataaaacgaccgctatcccagagtttttagacaacgcaaagagcctgggtttagcagaatatgagaaacgacataaagatatacaagattacttaaacctaggtaaagctgaggatgctgagaaactcaaaaataagtcacagtgggcagggcaatatttcgccttagaaaaaagttatgatgaatatgcaaatgaagcgccagatagctacaataacctactgaaaaacgctggaaaagacctgctggaaaatacagaagaagtcaaagttttcttgtacacatttaaagtaacaaaagatatcaaagttctcaaaccacacaacaattctaattcttactatgtaggcgatacagaaggttgggaaaaagcaaaagagataatgaatgatgttcaatctcaatccgaaaagaatgacaatccatttcccgagttaaaaaacctagaagacaaaaattttctcctggaagaacttggagagaaaggatatgcatggatggggccactccatgcaaaagaaggagcagagaaaggaactgaattctcttacgagctcgcaatcagtccaaacttattacgccagcacctcactttggaatcagaagaattacttggtacctacaagaaccgatatggttattgggacaagaagtgagatttttaacttcgcaaaaggaaactgtaattttaaaacctatcattggaaaataaacctttcaaataaataaaaaatctacagataacaaatctaactataataaaggatttataaatatgccaagatattctaattctcagagaacccctacacaaagtactaaaaatacccgtagaacatctccatcatcaaactcttctactgaacatctttcactttcaaatgctccgactaatgactcctccgttcgccaagaagttaaggaaaaatttatttgggaaggtcattgggaaggtcatatggaggcaattgaaaaagcgtccatacttggtaattttgctgtcagttttcgggccgcaggtaaaccaacactcgaagctttgggtaaaggtgccgcagctaagggccatgatattctggaaaaaaccattaaacccggttcaattgaaaaagcatatcctgaaaacgaagcttcagatgtcataaagaaagtgcgggaagcgggtattgaaggttatgtcggtcactggaataaagaaacgggacgtctcgaaggtatttatatgagcagcggtcacggtttaccaaatggacaggtcaatgggaaaatttatcccatagatttaaacaacctcgaagcaagtctggctcctttaaaagaaaaaaagaactgggctgcgctgcctttcaccggtgattatgatatgcatgacatgattagtttcaccactcagccacattcagtgccatccaattcatcagaagaaaaaaaaattatcgatcgcattaacgaatatatcgctaaatctgattcaaaccggccatttgaagatatagaacataatgttatcaggcatggtcctcaagtaagctatcctgcttttgcgatggataaagaaaaaaaagagataaaggaacgcgggggaattgttaaagccgttgctgaacccggcgaatttccggttgctatcgtcagtaaagggaaatggacaattgccaataatatcaatgaactggagcaattctataatagtattggcgcaaaaatgaaagcaagctggaaacccggcgctggaaatcccggattcgtttccaatccacaaaaaccaggaatggcccgatttagccggaaaaaataaaataaattattattacgtcaacaacatcctgcaaaataaagaggattttggcctattttatgtcactcaacattacacatgggaaatctttaatacataaagatctaacagaatttcctgaaattgaagcagagattttgttgctgcctaaataacacttcaaaataagtaatcatctggaaagaactcagacaaatttttgcgatctgaacatccaagattaacggaaatataagtaatcgatattttgacaaaaggattatcattatgcgaatgcaagttaaaaactgattgaaatgaatggctttcataaagtagttgttgtaaatataatattttctcgtttttccttttctgatatttgattctttaggctcttctattaatgcattcggtaaagatttgcctgagaaaatatgcgaagatgttttttgtaacttggtaaaaacactataaatggtaatgactaactaataagacagagaaacagattgtggcaaagaaagaaaaacggcctcaccatgacgcgctattcaaacattttttaacacagcccgaaacggccagagaatttctatccctttatttgcccgaagagatccagttgttgtgtgatttagccacattgaaactggagcccggcagttttgtggatgagcatttacgtcaactgcacagtgatgtgttgtactcggtcgaaacggcccggggacagggctatatctattgtctgattgaacatcaatccacccctgacccgttgatggcctggcgactgatgtattacgccatgttagcgatggcggctcacctgaaaaaaggccatactgaacttcctttggtggcacctctgctgttttatcatggtgagattcggccgtatccttactcaaaccggtggctggattgtttcacgctccccgaacaggcggctcgcttataccgtcaggcgtttccgttggtggacgtcagtgtgctcagcgatgaagagatcctgacgcataaaggggttgccctgatggagctggtgcaaaaacatattcgctgtcgggatatgcaggaatggctcctccaattggtggaactcttgaatgcggggtataatacaactgagcagcgcaatgtggtgttacgctatattttactgaatggacatacgccggatctctcacaatttgtccatcaactgattgaacaatctccggagcatgaaacgatgttgatgactattgcagaacagcttgaacaaaaagggcttgagcgaggtatcaagcaaggcattgagcaaggtattgagcaaggtattgagcaaggcattgagcaaggtattgagcaaggtattgagcagggtattgaacaaggtattgagcagggtattgtgcaaggccgagaggaaggccgagcggaaggtaaactggaaacggctcgtgccttattacggcatggcgtgagtttggacattattgtcaccagtaccggactgagccgggataaaattgaaacgttaaagcattaaattaatcttctctttgtacagcaaaatgccgatatttaagatcggcatttttgttcttattcaggatgatggttacttttacgtttgcccggcgaagctgaaaccggtcagactgaaacagcaatctccggagcatgaaacgatgttgatgactattgcagaacagcttgaacaaaaagggcttgagcgaggtatcaagcaaggtattgagcaaggtattgagcagggtattgaacaaggtattgagcaaggtattgtgcaaggccgaaaggaaggccgagcggaaggtaaactggaaacggctcgtgccttattacggcatggcgtgagtttggacattattgtcaccagtaccggactgagccgggataaaattgaaacgttaaagcattaaattaatcttctctttgtacagcaaaatgccgatatttaagatcggcatttttgttcttatttatagggagagaaatgacaccttaagagcatggggaatgcgattaggtgagctgtttgcggaaacaaaataacttgttctgtttcgtcaaaaccttgatgttcatgcgcctgatgtaaccgtttattattgatttttgcatccgaacagagttcataaaaaagcaaaccataggctcaatacgatcttttccactcactcttttgatcatcaattaatcgacaaaatagaaaataatcattcattcataattttcctatccccaaagccaaataaaaccgcgcttaatacctaaaatgagtaactcctaccataccaattaataattatcacacactattaattaatattccctaaaaatattcattacttataatcaggccgctttattaaatgcgaactaaataatcgcgaaataaatcttttcagcataaataataaccgccataaggcaggttgctgcggtagctatagccatagctcggagcgaatcaaaacctcagtattaatcaaaacaaggctataacgctttgtttatcttttaaacgtaaataaccaatcaaggaataaatcatgtctacaactccagaacaaatcgctgttgaatatccaatccctacttatcggtttgttgtctcaatcggtgatgagaaagtcccctttaacagtgtttccgggctcgatatttctcatgacgtcatcgaatataaagacggcaccggtaattattataaaatgcccggccaacgtcaggcgatcaatattacgctgcgtaaaggtgtcttctccggtgatactaaactttttgattggcttaattctattcaacttaatcaggtcgagaaaaaagatatttcaattagtttaaccaacgaagccggcactgaaatcctgatgacctggagcgtggcaaatgccttcccaacttcattaaccgctcctgcttttgatgccaccagcaatgaagtcgcggttcaggaaattagcctgaccgcagatcgagtcactattcaagcggcttaagactcatttataaagctgtttactcaaaatattgcacaataattggaggcaacatgccaacatattcctatcccggcgtttatattgaagaggacgcttcacccgcactctccgttcgttccagtgcaacggcagtaccagtctttgctattacaaacaacagttcattaatatcagataaaccctatattcgtgttagtagttggatgaactatttaacactaaaaggcgaaccatttgatcccaagaatatccttgatgtttcactgcgtgcctattttattaacggcggtggatattgctatctcgtcaaaactaaagagttagaaacacaagtgccaaaacttgacgatgtgacattattgattgctgccggagaagagatcaacgaggtggcaggaaaactttgtcagccgggcaaagggttatttgccatttttgacggcccacaaagtgataccgatataaaagaaccagaaaaagctctcaagccttattcccctacgccttatggcgcagtttattacccttggctaaccgctgaatggggagaaaataaagccgccattgatattccacccagtgcagttatggccggtatttatgccagtgtcgataacagccggggggtctggaaagcgcccgctaacgttgctattcagggcggcttacaacctaaatacccggtaaccgatgatctgcaaacgcaatataaccaaggcaaggcattgaatatgatccgtacctttcctaagagcggcacgctggtttggggggctcgtacacttgagaacagcgataactggcgttatatcccggtccgccgcctgtttaacagtgcagagcaaaatattaaaaatgccatgaatgccatggtatttgaacccaacagccaacccacttggaaagccgtccacagcgctatcgataactatctccatactttgtggcagcaaggcgggttgatgggcaataaagccgaacaagcttatttcgtccaaatcggtaaaggtctcaccatgaccgatgacgatatcaagcagggcaaaatgattgtcaaagtgggtctggcggcggttcgtccagccgagtttattatcttgcagtttacgcaaaacatcgctcaataatcggaggcaacatgccaactacaccaacttatcctggcgtctatattgaagaagatgcctcactggctctctccgttagccaagggaacacggcaatcccggtttttattggccgtttctcaccgaaaaaaatcagcgcaacacctgaaataacacgcgtgagtagctggttggatttcactaatctgttcaatgtgggttgtattaggtcggtagcaatcaaatcaactgagtctactccacccccttccctttctgttcctgagaaaagcgaaggtaatgcagataacaaacacaataatgtagaagacaaaagcaatgcaaaaatcaaacacattgcagaaaccaaaaacaatgcagaaactaaagctaatgcagaagtccaggactatgcagcagttgtccctgtaacaaagcctactcacatagacggtaaaagcacccattacattcatcaggtgattaccgtaacctacacgacaagcagtgatgccttaaagctttatttccaaaatggtggcggaccttgttatatcctgccaatttctaattcagaagataccaacacgctggcattaatccctgagttaattgagcaggctttagaaattaccttgatcgtctgccctgaacaggatcctgcttatcagagtgcaatatatggcaacctgacccctttattaaaggccggatattttcttatcgcggataatccgaataaagaaactgcacttagcgttagcctgcaatcacaaaccgcgacttattatccggcagtaaaagtctcacaacttattcaggtggaggagaataccgtcacggtttcaggctatcaggatgcaaaagttacccatctggcagagctcaaacagcaaaactcaggactctataagcaagttatcgaggcaataaaacaaaaaattgctgataacaaaaaactcattcccgccagtgcaatcatggctggtgtctattgtgctaccgatgctcgtcgtggcgtctggaaagcaccagcgaatgtggttctcagcgggattagtgatgtagcggatcgactcacggaagatgagcaaggcaccatgaatcaaaaaggtatcaatgctattcgctatttcaccaacaaagggtttgtcgtctggggcacacgtactctgcaagatgatgacaactggcgctacattccggttcgacgcttattcaatgcggcagaacgggatatcaagcaagccatgcgatttgccgtttttgaacccaacagtcagcccacctgggaacgggtccgctcagcgattgataactatctccatcaactctggcaacaaggggcgctggccggtaatagcccgcaggaagcctattttgtccagattggtcaaggtgtcaccatgtccgacattgacattaaacaaggcaaaatggtggttaaggttggaatggcggcggtccgtccggctgaatttattatcctgcaattttcgcaaaatgtagcacagtaatcgtactgaggcgcggttcgccgcgcctattctggcaaggaaatgagaatggaaataaaacagccgggcgtcaccattacggagaacctgatatcccagcaacaagatgaggcgtttatcggtgtaccggtttttatcggctatactcaaccgagtaaaaacaatcgtgctagtgacaaaaccgccgtcaagctccacagcctgaccgattttaccctgtcatttggtgaatcaggattaacatactattccgtgcgtcacttttttgacaacgggggtcaacaagcctatgtactgtcgttaggatcggataaaccacgaggcgattttcactcattgaccaccaccctacaacaagattgggttaaacaagcgatctcggcacagagtgctatcacgctgattgtggtccccgatattgtctatctgaatcagatggatgatcccgattcagaaatcgatcaatacgacaaaatccagttctggctacaattttggcaatcagtacttagcctctgccagtgccgacgcggcatcatgggattgctggatgcccccgatgatcccgctctggccgagaaatgtttaacgcagctctcttccagtgatcggcaatggggcgcggtatactggccaagattgaacagtgcttatcaggaacaaaatcagcctgttgttctttcgccgaccgccgcagtggctgccatcattcagcgtaacgataaccaaatggcggtctggcatgcccccgcgaatgtcgcgttagccaaggtgataagcccaatacgctctcacattgaagccgataccctgtttaaccagaatggcccttcgttgaatctggttcgcagcttccccggcaaagggatcaagatctggggatgccgcacgctggacaatacccccgattctccctggcgctatatccagacacgccgtctggtttcctatatcgaagcccatatgactcaactgggccgggcctttgtgtttgaaccgaataacgccatcacctggatgaagtttaaaggtcaggcttacaactggttacgtcagttatggctaaacggcggactgcgcggtacgcaggaagatcaggcatttgaggtgttactggggattgacgagtcgatgagcgaagcagatccacgggccgggaaaatgatcatgaagatcaggctggcactgttaattccggcggaatttattgagctgaatctgacatttgatacccgcaccgggatcagccattaaacagggacaaaatatgaacaatttatacaccccgtcggtatcacaccgttttatcgccagttttctgtttaacaatatccccagcccactcgacattgcctttcaacggatatctggcctcagccgtgagttgcaaactagccaacatagtcagggtggggaaaacgccagaaatacctggctggccgagaagatccagcatggcagtctggtactggagcgcggcgttatgaccgttacgccactcactctgacgtttgaccgcgtcctgcgtggtgagaaagccgtgtatgccgatgtggttatcattctactgaatgaacattcaattcctgtggcaagctggacattaagtaacgcgctgccggttcgctggtccaccggcgaccttgacgccaatagcaatacggtgctggtgaacgctctggaattacgttatcaggatatgcgctggttaggagtaaaagcatgactgttgaaattaaagagctgattattcaggctaaagtgaccgattcagccagtcattcggtcactccacgaacactagcgcaggaagtgctggataacgccgacctgattgaaaaagtgaaacaagcagtattagatgccttgcgcgaaacaggaggtcattatgagcttaattgaacgcagcctgtccaaactcaccctcaccgctttcaaagatcgtgagggaaaaacctcggtaggcagtttacaggcaatgtataaccccgataccatccagctcgattatcaaacccgttatcagcaggatgaaagcgttaacagtgccaaccaaagcagccgctatgtgttatcccaaccggcgggcctgtcattagtcctgttatttgacgccaccatgcccggccataacaccccggtagaaacgcaattagcaacgctaaaagccttgtgtgccgtggatgccagtactcacgttccccactttcttaaaatcaaatggggcaaaatgcgttgggaaaacaaaggctattttgcctgtcgggccagtggtctcagcattcattacactctgtttgaccgggacgccacaccgctgcgggccagcgctaccctatctctggtggcagatgaaagctttgtgattcaagctaccgagcagcaattaaaatcgcccccggctactgcggttaacgtcacggatatgctctccctgccgttgatcgccttaggtgccggcgcttctttggcggggggtattgattatctctcgctggcttggcaaaacggcctggataatcttgatgactttacccccggacaaatgttgcaagcacaggggaaagcatgaagataccgacgataacgatcaaaatagacggcaaagtcctcaatcaatttacggttatcactctgaccgttaaccatcatattaatggcatcccctcggccaatatcaccttgggtatcgccggtgatgcccgccatatttttgatgccaaggcacaagctgaactggcaagttgccgccctaatcatcaacttagcgtgcagatcgaaaaagccgtggtgtttaaggggatcatcgttcggcaaacattggggcttaaaggtcaggacagcatcattactctgaccgccaaacatgcgttgcaaaaattaactcacaacttccactcgcaactgttcaacaaacagagtgatgaggcgattatcaagaagttgtttagccaagcgggtatccctgtcacgataaaaccagcccctcagcttaaaacggtgcatgaacaaatggtgcaattccgctgtaatgactggacgtttctaaaaaatcggctgctcgcgacccatacctggctgctgcccggcaacgatagcgtgacgctggtcaccccggaatccctgaatcggtcaaccgtgcatactctccaccagcgagccaaccctcaggatgcggtgttatttgaagcgaatctgcaatgggataaccaacgcaaccccaaaaccgtgaatgtacaatcttgggatatcgcccaacagaagctgtctccagcccatcaggtaaaaaacagcggccttggtcgcaatcaactcgccacagacaacctgacatcattgaccagccaaccatggcagtgggttttcagctatccgttggataatgaacaggccaaacagcttgctcaaggcatcctgaataaccgccgaagccacaacgtctccggtaattttgaggtcgaaggcgataaccgttatcaaacgggggatgtgctggcgttaaacggctttggtcaggggatggatggtcaggcgattatcaccggtgtcagtcagaccctcaatcaacggcaaggctggcgtacccggctaacgctggggctattaccggaaacagagcaagttgtaccgcaggcaaaagagctgcatatcgggatcgtggaaaaataccagcgagatagccaatcattgggccgtattccggtcaaaatcccggcgttaaacttaaccaacggcaccctttttgcccgcctaagtaaaccttacgccagtcatgaaagcggtttctgcttttatcctgaagcgggggatgaggtgattatcggcttctttgaaggtgatcctcgcttcccggtgatattaggctcgatgcacaatcctaaaaacaaagcgccgttagaaccgagtgaaaaaaacccggtgaaaaccttagtgattaaacagggagaaaatcagcaagcattactctttaatcataaagataaaaccctcgcattgaatagcggaaaacataccttatctctgcaacaggataaagatatcacgcttaattccgctaagaatcttattacccatgctcaggaaattaaaatagaggcgcaaaaatctctgtccgccgccggtaaatctggcgtagatattaaaggtgcgaagattaatctaacccaataataaggtaataagatgacaaataaagcactagccaataaagtattaaccaacaaagtattagccgatatttatggtcggggttgggcctttccgctgcaattttctattaaagatagtacgtataaagatagcgctcatcctgaaatacccacgggcgtcaccatggcggaaggggccgaaaatgtccgccaaaatatgaaaattctttttctcaccgaacccggcgaacgaattatgcgagagaattatggttgcggcctgaatgattatctgtttgccaatatccgtgacgaaatgatggcagaaattcagactcgaattgaagaacgggtattgcgttatgaaccccgcgccgatattagcgagatccaggtcaaccagagaaccgacctgcccaataccttgcatattcaggtcacctacacgctgagaggcagcgaaatcagccagcaaattgaaggtgcccttgaagtgaatgaaggccgggtacaggtgagtttatgagcaaacaactggtggtggatggcgacactttgctgttcgagccgttatttggcaaccgacaagtcaccattctggggccggcaaccatccgcggtagcggacatacccaaattcagggcaaaaagattgtcatggtcggtgatgaaaaaaaggtgcaacttcaagcgcaatatatcactccaagccacccagttcccggcatggggatggtcaccattgctcaattggatgccagccagcaggtaaacttctgccgtagtccagtcacggtaattgttgtcgggcaacaatttatcgcccgatttaccccgacacagccagccaataatccatcgagcggcccggatgtgaccgcccccagtatgggcaaaggccggtttattgccagccaatatgcagtcactgccggataaataatctttttaactttattttaaataacaatattttcaaataatcacgatccctgaaaacctatcgggaataattatataacaggtggtaaaaatatgggacaagccgagttagaaaataaactctctgctattgtgccggatactgtatttaaacttgatgaaagaagtacgctagatattttaaactggcttaaagcttacgctaaagaaattcctttcgatcaagagaaaaaacagttctgggacagtttctactttattcaagagaataatcctcaacaactagcggacatttaccaaaatgtgaataaagccgatggtcgattacccgcacatcaagcttttgttttggcttttttaacgttattagaaacaactaatcgattattaaatacctttccggcccggcaccgtgatctttattaccgggaattattggggctgaaacccaaaaaagcgcaagcagataaagttgcgataggaattaccctcaatcccgacagcacagaatcgctgatagctcaaagcacgctatttgatgcggggcaagacagcgccggcaatccattacactatgcgtcagatacagatttattggcgaaccaaggggaattaaccgacttacgttggtatcggaaaaaaaataatggttggttatcggcaatcgcattaaatcttgcagataacatggcattgcctgaaaacggtattcgactttttagcccaacggccaatgatgttccggttctatccggttacctgatcacttctcctttatttgccatgtcagcaggagagcgcacgattaaagccacattagcccgcgaatggacaggtaatgctgagaacatcaccgctaaaatgagttcgggcgatcactggctttctttatctgcaaaaaaaggacagagcaacaatacccattatcttacactttgtttatcagctaataatgaccctatcagttcccctgatggcttggataatatggcgtttgatataccggtgttaaagctaggcaccactcaaggcccgactctacccaagattaccgacattgaagtcagcattaacggtaaccgcagtgtgcactatgcctctgatggcggtattgaacagacggataccaccagcttcccgtttggtcaatcaccgtcgttaggctccggttttaatctgattgccccggaatggtatggctctgaaaacgcaacattgacgattacgcctcaatgggtgggattacctcaacaaaacttttcaaaatggtatggaggatatgaaactaagcccgacaatagtgcctttaaagtacagggttacttaatcacacctcaaaagagagaaaagcttaatgaggtgcaagcattattcaatggaaaagaggcaccacaaggacaaaacctgacatttaccttaccggcaatgcattatccccttgcagacagcccatcgcccaacgaatggccggcatccgtgcgcatagaactggccggacaagattttatgcacgcccaatattggcaaaatcccacgggtaaaaatgtcccctatacgccacaaatcagtgcattgcagattcaattcagcgctaaagctaagcaattttccatctatccactgacgccttttggccaaggcgaggcaacagcagaaacacctgcattaacccatgaagccttctatttaggctttacgggcgtatcaccgggacaaactctatctctctattggcaattagcaggcattaaatcgctcgcgttatcttggttttatctcaacaacagcaatagctggagcaaattagacaaattagttgacgaccaaacccataacctgtttgaccggggtatctggcgcactttattgccacaggatgcggcaaatcaggcggccttgatgccgacaggacgctactggctgaaagctgagataacgcaacaaaccgatccgcaagattacccacgcattaacggtctactgtataacgctaccaccgcgacgttgatcaacgcagaagccgttgagcagacgcactttatcaacggattagccgccgacagcattaaacagccggtaaacacggttgttgccgtcagcaacatcacccaaccttgggcctcttgggatggtcatccgcaagaaaccgagcaagccttcctgacgcggctcccgcctcggttatctcaccgtaatcgcgcgctgagttggggcaacattgtcaccttattaaaagagcaatttgtcagcctgtttgatgtcaaatacccgtctgccagtgaattaaccaaaatcccggcaccggaaaaacagcaactgattgtgatccctgacagccgttacaaagataacgacgatgcgctgcgcccaaaattaaatcccgctcggctggcagagatggtcgaatggatcaaacaactcagcagcccttgggcaacccttgagatcagcaatcccacttacattgacgttaatgtgaactatcaagtgacctttatcgcaggtgttaaccccgactacggatatcatcagctacaacagcaattaagccgaaaatatatgccgtggggcgaaaataccgctatcggcgtgacaaccggtaatcacattgattactaccccttgttagccacgatccagcaatcttctctggtggaacgcgtcaccgatttaagcctaaccattgctaaccgaaccaccggtgccgtgggtaaaagtatcgaaaccgccgataatgaagtgctgattttagtctggccagaacagcgtcccttaaaccaaggagttaacccatgagtcatcaggatgccctgtttcccatcgtcaaagacgatattaccttcgatgccttactcgctcaggccaaaaccgtgattgagcagcaatccggccaatgctggagcaataccagtgaaaatgatcccggcatcaccttattggaagcctgctgttatggtgcctccgatctggcctaccgccacacattaccactgagagaccttctaacgccaaaaccagaagaccaaacatccggcgacggtatttttcctcaggagttcggcccacaacaaacactgacctgtggcccgatcaccgcagaagattatcgccgggctttattggatttacatagcagcgacacaattaataacacccgcgaaggttattttttctttaatgatgtccaattaattcgtgaacctgaaaatcaacgttatcagtattggtataacaaacagaaacgtgaatacagctttaaaaactccggctcagatagccaattagcactaagaggaaattattggctctatttacttcctagccgggaaactgaaactaatacaacactggctgaggagagtctgaaaactttcctaaaagataaccgtaatctgggggaatccgtcagcaaaattatctggctgcaacctgccgatctccccttgcagattgatattgaacttgaagataacgtcattgatcttcctgatatcttcgctcaggtttacatgacggcggaacagatggtactgcccaagcccgaacgttataccactcaggccatgaaagatcagggttaccatcatgaagagatatttgccggcccttatttacatcacggttggataccgaccttacctcaaaccaaagattacaccggcgatacggtattaaatctcagccatctggttaatcgattattagcgattaaaggtattcagagtgtaacccggctagcattagctcatcacgacacaactattacgccattgtcgaacgataattggtcttgggaaatcgctcaaaaatattaccccagattatgggggagtgatccactggcattaattacctcagcaaacagcccgcttaccattaccgccaaagggggcgttaaaattggtgtttctaaacaagatatcgaagaaaagcttattgcagaaccactgattgatatacagccggaattactgcattggggtaaatatcgtaaagttctggattactatccggtaagcaataaattacccacttgctatggattgcagacctatgccagcaaccaacagcaaatacagttacaccaatttatgctcccttttgaacaaatgttggctaacggctgtgccgaactcgcccttttaccgaaattactggcctttaaacaacggggagaaacagtacacggtgtgcaatggccttttaaaacgggtacagtcagccatcgtgttcaccaacaagtcattcctgatttaaccgcaaaactaagccgcgattcacaaatctatattgataaccatattcagaagccaaactatataaaagaggcgacaattctgaattatctgttgggctattttggcgctcaacttgccgccagaccacttacatcgaactcactactgggtttcaaagactttctgtctactcagcaaggctatctggctcaacaacccgaactaacctatcaacgtaataatattcggattgataaagtgtcggcactgcaaaaacggattgccgcccgcttaggtttgggtggagaatgtttcagtaaaacacctaatctggatgacctgcctttttatttaattgaacatcgtcaacttttgccgataaaacccgacacgaaattcgacgataaacaaaaacctgacgatctaaaggtaattgaagagaattcaggctctaaaaatcatcaactcatcatcacacaacaaggtattgcaggtcggttattacaaggtcaggtgattaatctgattattattgaagatgatagagagtttatattacggagccaaatgatcaccgaagtgacaggagataccttttcccttagtacccgtaacagcagcgatttggaacgcaatctggacagaataagacagaaatttaatgatggtaatctgcgctggcaaaatagcccagtgtggctggaagatatggattatcaattggtttatgccgatgagacatataaaaatgctaccgacgatcaacgttggattacttccagtgctcaaagccccttccctgctatgattgaagaaaatgacgaaatcaccctgaaatatgtgattactccctctgggccagatctaaaaatatcacctcgtacagttatccctgaaccgagaaccgaatatgaactcaaagcacgagtcgttaaatttgatcgtattcaaggcaagatattaattaaatgcaaccaagactcaccgaataaaaactttccaaaagaggccgaagcatggctttatcgctggtatttctccagcgaaaaatatgctttggccgatcgcttttcatttgtggttagcgtagtagtgaatcgtcggttaattcagaatggcaaagttgatccttacaaactagaatcttgggtgaaaacagaaatattagctgaattccccgcgcatatttcaatgattatccattggttatcaccggaacattttaaagattttgccagcacctataaacgctggcaaaacaatgacgcccctttaggagacgaagcataccatattttagaaaccttaaccttgggacgcctaccttctaatgcaaccggtattggtaatatgcgaattgccactaaacagcaacgtaccgaggtcattggtggatctggcaatcaatggaatgcaacagtcataacaagtaatcaattattatatgtgcctaagccgtaggcataactaaactcaatgcaattattaataaagacagtagcaaaaatataaactaatttatccaatataaaaataaattaatatagcactacaaaagacttattttaatattaaatatcttctcctgtttaattatacaggaatacctataagatatttaaatcataataatttaacaccatataatataggatgataaaaatggaaaaaaaatctaatctatctaatgcaaaatccaatatggaaaatatcaaatcaaatggcccatcagcagatgatttaaaaaagcgctttaaagaaggcagtattccattacaaaccgattatgccgacctgattaatattgctgatatggggcgctgggctgttggtaaagctcccggtcaaacagataatccaaattcagcgctgaaactggataatggcggtgcattagcggtaaaaattaacgacaacggtggtttaaaggcagatgagaatggattaagtgtaaaaatcaagaataaaagcctgtcagttgataataacggattagcagtcaatgccggcagaggattgagaattaacaacgataagcttgaagtctataattatcacggtattgaaatagttaatgaaggggtaaaagttaaagctggtgaaggtattaaagtagacagtaacggtgtcagtttaaaaatgggaaaacctatcagtaatgccttttctccattaatattagaacccaaaaatgatgttttatctgtaaagataggcaatggcctgtttgatagagacaatggaatatcagttaacccaggtaatggcattgatgcaggttacgattatgtggctgtcaaggctagtaatggtattactgttgataatagtggtgtttcagttaaagcaggcaatggtattacagttaattcaaatggtgtaagtgttaatattcaacaaattgcatcagcactcgcggacttaattattccttcaggaacaattgtaccattttatagtaatggcagtttacctaatggttggctatggtgcgatgggaataatggcacacctaatctaaacaagggtataccgaatgagatcaccttagttgcaggttggataaaaaaaataaatagtgcttattttatcttaaataatatatacccgtaatcattgaagatgcttgattttatccgaaatggagatcattatcctcgctatgaaaatattcattaccgatgaacaaaaagccgaacttgaacatctccatcacacctgccgtgataagagggagtgtgatcgcatcaaagcggtcctgctggcctctgaaggctggagttcagtgatgatcgctcaggccctgcgtcttcatgaaatgaccgttaaccgtcatatcagcgattaccttaatcaaggtaaacttaaatctgataatggggggtctgatagtttgctttctcaagaacaaactgattttttaatcaatcacttatctcaacatcttttccatcacacccatgaaatcgtggcctatgttgctcagctctggaatattacctttagcattcccggcatgaataaatggctacaccgtcagggtttttcttataaaaaaccttgtggcgtccctcataaattcgacgcagaaaaacagcgacaatttattgaatattatgagaatcttaaagtcacagcgaaagacgaacccatcctttttcttgatgctgttcacccgactcaaggcaccaaactcggttatggctggatgcgaaaaggcgagaaaaaaacagtaaaaacaacaggaagccggactcgcctgaatatattgggcgcgctcaacctgaatgccattggtcgtacggtgttccaggaatatcaaaccatcaatgactacaacatttgctgttttttcaatgaaataagaaagtcttatcctgactatcatcaaaaaattcatcttattgtggatggggcgggttacaacaaagctcatcttgttaaggagtgggcttatgttagcaatattgagttacattaccttcctccctatagcccaaatttaaacccaatagagcgattatggaaggtcatgaatgaacaggttcgaaataaccgttattttgcggataaacatgaatttcgagacaacgtcttcaaatttttcaccacaacgctaccggatatagcggactcgctgatgtctagaattaacgaccattttcaggtgctaaaaactgcatcttgaagtttcttgggtatatatggtgaaaatagtgaaaacaatacaaaagttcaagacggaaatttaagaataagtgcattttatacaaaatatatcatgaaaaaatagactcgttaatcagaatagtattatacatctatttatattaaccacatttattagttaaaaatgagatattaatatgtcttgggcaccaaatctgttaaaccggattaccattactatttcaactaataatcaacagctagctaaaaaagtattgcatggctccctgcttaatcaagacaatatacataaattactcagctcatactttgatgaatataacattcatcagcatatctctttagagacattaacccttaatcttggtgaaataagttcctatgaatttaactcattattccctgttcgtctcaaggctgagctgaataaagtacttaaccaatatcagataaacaaccatcaggaagaaattctactgaatgaaccaatatctaataaatttaccgataattcttccgcattctgcgataattatttaattgatgcggagagttttattcattttttatatcaacaagattcccaattaaatacactggagacaataaccaatcataaagagattaatattaataaacttattcaccaattagcacaaatagagaacaaatggatattgctattagcaaaaagctgtctatctgaacatggtctacaacgacttttggctatcaaacaacccgctttattcattgccattaatcgcagattatccgaaaaagtaaacaaaccacaacatcaggaggagcttgtctcctccacacaactgatactcaacgcactggaatatctacagcggcataatattcaggaaatacctaaacccaatacgaaaatcatttcacgtattatcactgaacttaataacggcgtacttaataccgatcctattattaagctatttcgccaagctatgaaccaaaacacgccattaaatagttggctgaaacaactctggcaaactgtttctgtttcacggctttgccaaaaacatctgtcggttaaggagtaccaatatctattggcatgctttatgccaaaccatatagataaaaatacacccggcaaaaaatcagctacgaataacattaatttttcagatgttcggcaacatcaacctctggtaaatcagaaggttattaccgaagatcagaaaatactatcaacatcaaactctccatgccaagtcaataatgccggcatattaatgctctggccgatgctacccgcattgtttaatcaacttggcctacttgaggggaaaaagtttatccatcgtcaagcccaataccatgctgttaatttccttgactatctaatttggggaaccgacgaaacaccggcagaacgtaaaagactcaataacattctgtgcggacttatgatcaatgaaaataccgaatcaatctctgttgaaccagaaaaacaattaaccaccacgcaatggctggataccattattactcaacttcccggctggaaaaaattaagctgcaatgacgtccgccaattgttcttacaacgaccgggtgaattattggtaaacgagcaagaaatcaaaatcaccatccagcaacagccatttgatgcattgttggctgactggccgtggccattaaatatcgccaaacttccctggttggatcgctctttattaatcgactggaaaaatatttaacaggtttatatgaacgctttacttaaaaacaaccatgatatggcgacagaatttcactggatttatccccatctggaacgtattgatctacgattacaacattactattaccaacatggagaaaaatacgattatttaccggagagttttctacttaccgaagatgaattaaacccgcggctggcaaaaccacaaggcattcctcattgggtcaccaaacaagatgatattattaattcccctgaaatcgacgaaaaccccaatgcattatcacaattaattgaacgttttgaactgactgaatttgaacgagatgttttattattaggtttattaccccatttcgatagccgttatcatgcgttatttgcggctctgcacggtaacagtagaaaacagtggcctagctttgacttagccattgaattatttagccaacgccaaggtgatcggccattacgacaaaatagctttctaccgcaaacaccgttaatcagtcatcaactattacggcttaataaccacgaagaatctatttggttacaaactcaatttctaactcacagcgctgtctggcatttcttatcaggccaacgggttattttaccgccgctgacaacttgtgcttattggcactcttctgcctcacatcgttggtatccacaatccctttacccttcacttgaaaagatattattaaataaaactgacgaaatacgcccgctggtaatactcagaggaaaacaagatagcgccagagaattagcggtaagcaatatgatggctcttcatgatatcagtacattaactctagacttagctcaactgccggaagaaaataactctaacttgctaatagatgcagtccgggaagcacgattacatgatgcctgtttattaattcgcaatttttctttgctcaaagatgaaaagaaaatattacacagtgaattttccacgttattgaaccaagcaaaattacgcgtggtttgtctggcagaaccacaagattcattagtgtggattaaacacttaccaatagtgcaaattaatatgccagccctgactctggcagataaaaaagccatgctggaagccaatttatcggataatatcgcccagaaaataaatatcactcaattatgccaacgtttttcatttaccgcagaaacattaccgcaaattcttcaagaagcaaatcaataccaaatactccgacaaccggaaggtcaattggaagaaaccgatctgcgtaaagcattaagtttccgtgctcaacagaatttcggtaaattagcgcaacgaataacccccaaacgcagccttaatgatttagttatttcagacgtattaacgcaacaattaaaagaaattattgccgccattcattaccgtgaccaaattctggctaccggctttcaggaaaaaatcggttatggtaccggcattagtgcgctattttatggcgaatccggtaccggcaaaaccatggccgccgaagtgattgccgggcatcttggcgttgatctgattaaagtggatctctctaccgtggtgaataaatatattggcgaaacggaaaaaaatatctcccgtattttcgatctggccgaagcagattccggggtactgtttttcgatgaagcggatgccttatttggcaagcgtagtgaaaccaaagatgctcaagaccgacatgccaatattgaagtttcttacttattacaacgattggaaaattatccgggattagtgattttagccaccaataatcgtagccatttagacagcgcctttaatcgccgttttacctttattacccgttttgcttatcccgacgaaatgttacgtaaaaaaatgtggcaagtcatttggccggaacagattaaattatccgataccattgattttacccatctggctaaacgcgctgatttaaccggggctaatatcagaaatattgcgctattagcctcaatgttagcgaaaaatgaccactgtgaccaaatcgaaaataaacatatcaatcgagccattacactcgaattaaataaaactggccgattggttttctaaacatttaacaaaattggaataaacatgacaatcctaattgcttctgacaatgcgattattgaagtaaataatgcattaaatactattttatcccagcatctgaatatcaatggcaataagattgatatccgttttgatctacccgaaattaactccattcaatcggaaccgacagtcagtgtatttctttatgacatcaatgaagatttacaattacgttctgccgaaccaagacgttataacccgatgaccagcacattattaccgggatgggtcaatatcaattgtcactatttaattacttattgggacgctaataaaccatcaagcgacagttcaagcccggatagccaacccaataatcaagctgcacaagtgatgactcgtgttctaaatgcattaattaacaaccgtcaattaaccgacattcccggtgcttatacccgaattattccccaacaggagaatttaaacagcttgggtaatttctggcaagctctcggtaatcgccctcgcctctctctaatgtattccattaccgtaccgatgaaactgcaaaatattaaagacaatattacacccattaaccaaatttccgcttctgtggagcagaaacccaacctaaataattcacaaatcaatcaagctctggtagataaattatgtgccgatttaggtggtacagaagatgctcgtcttgctttggctaaagtcaatctggtaactaaatttgtcacagacaataatgatagtaatgaaaataaaagcattattctggagatttctggcattacctattcaacttatttacctaaaataagaaatattatttcaatatgggtaaatagtcaaaaatccgttgttaaggtaaatgggatagatattaccatctcaaaagaggactctaaagaattaatagaaatataaaccatttcattaatagatttaatttccatattattttatcgaggaacacctcttaataataacttataggtgacaatattatgccaaaactaacagagcttttaagccgtttcgaaaatcccattcagaatcaaccaaatcatataagtaaaaaaaatcccatctctaattccaaagttttaaataatagtgaagaaaaaactgcccccctcgaattaaaacatgatgacagtaaaataaaatcacaggtatctataccaaatttagtgaaaaaaaatgaaaaaccagcagcatcgaatacgccaaacaattcacatgaaaaagtcaaagctgaagatattttcaaccgatttaaaagtaaatttgatccttatgacagagaattacctttcgacataatgaataaaataaccaataatgaaataaaattttcttctgaaaaatcgaaagatgattatttagctaaagtaaaagacaagaaattcacactgagacattatactgccggcactgggcaagaaaaacctacatttgatgagattagctcaaactttaatttggtaaataagggaataaaaacattaaatcgtactcaaggaagtaacaccaatgaagatgattggaaccgtttaggaaatacggcgtttactttctacttgctagcaatagatggagaagtatccaatagaaaattcttatctaatacaactcattttgcagaaattaatatagaagattcagaagaacttaaagaacttggcttagatcaagctgaattctttgcttctcctgatttacttcacgaaaaaaatctttcacaagcccctgcggtaaaaggaaaactgtctgatttgaaatcattattattaaaacgatctggcataagttcagttcaattagggcgtttagatgcgaaagcaattttaaaaagcatagacaatgaatttgggaatagtctcgaaatcaaaatcccagggaatgttaaagtgaacaaatggaataaaatttaaaagtaaatatataatcactaatattgatattacattaatattttcattatcagaggtaataatatgccgacaaataaatacagtaaaaataaaagcccagagaaaatcaaacaaattgcaggtcttaatccgagtgatctggaaaaaaactattccagtagatttattacaaaaaattaacaggtaataatatgccaaacagcaaatatagtgaaaaagttaaccactcagcaaatggagcggaaaaatgctcgatacattctaaccaatataatataaataactgtacattggggttaggattggatttaaacaaaaaattaagaacagggaatgaacgaaatatagaaggtgcacaaccttttattccattcccttcgaaacaaaaacaatatagtaccagccccatagcaatggctgatatattaaatgaaagcgcactgacttcacaaccaattattaccgatttaattaatccgcaaaagataaaaatgtcagacggcgtaaaaaatattttaaataacaaagaaggaggcggagatctagtgttcaaggcactacagattaaaccatcggatgaaactctgccattcaatgcattaaaaattgtcgatacctatcaagaagaaatgccgaataaagacatgtctatttcagcttattgggccccacaaggaggatatgttgatatcccggcccaacccgatatcagccgccatccacagtatgtatttaccccaaatttcagtggatgttcatttgtagtcgataaaatgaatgaagacactctccgggttcggcacgtacaaggtggtcaagaagatgttgaatataataaccaaaatattgatcacggaatgggtatgattacggcaatggaattccgcgattatggatatcacgaggctgatgacaaagttatagaaaatacctatggttttgcattcttaaaatttaaccaagagaaaaaacagtggcaacttcactatcagaaaatagccgcagcccctaatatcataaatataaaaactaaatctagttggttgccattcagtaagccttcaattgaagccgatacctttaccttcaaaaatatgaaagtccctggatatagtaggaagaatatcaataacaattaatatatacccaatagatttcaagttgcagtgcggcggcaagagaacgcatccccgggagcataggtaactatgtgaccggggtgagcgagtgcagccaacaaagaagcaacttgaaagatgaagggtatagataactatgtgaccggggtgagtgagtgcagccaacaaagaggcaacttgaaagatgacggatatatcaatagatttctgattctatttcactattgcaatactcaaaatacaacacggtcattcccatagattaaatacgtcattaaataatcaaaataatccacccctaccaaataaacattttaatttatttttatgataatcattagtgtgattaccctttcactttgctattaatttatcggtaaaatcataaatagagaaatcaaaccatcctatttaccccactcaataaaaaaataaccccaatcaattaccttgactttatcatccgcaaaacaaaaaaacctaaaaaaataaaatacaaatagttaccaacaaaatattttatagatgtgaaatatcatttaacattaaaattacatttcgtcatttattcttccgcgatagaaagcagtaaaagattgttgataaataaaatcattacaatctgctatatcaattaaaaaccaccattattattaattgataatccgtataaaaattcattatctataatcaattcgttttacggaaaacaatttagataatcgtaaaataaactatttaatataaacaataacctctataaatcaggttgttgcggtagctatacccaattgttaagtaataagagaagcaaaataacagacatttttattatatttcacatgtataccctatggatttcaagagcgagtgcagccaacaaagaggcaacttgaaagatgacgggtataaacaataaaggaaaaaaccatgactataactccagaacaaattgctgttgattatcctatccctgcttatcgatttgttgtctcggttggtgacgagaaaatcccttttaacaatgtttccgggcttgatgttcactatgatgttatcgaatataaagatggcaccggtaattactataaaatgccgggtcaacgtcaatcgatcaatattaccctgcgtaaaggggtcttccctggcgacactaaactgtttgactggattaattctattcaacttaatcaggttgagaaaaaggatattgccattagcctgaccaacgaaaccggctctcaaattctaatgacctggaatgtggcaaacgcctttccaacatcattcacctccccctcttttgatgccgccagcaatgatatcgctattcaagaaatagcactggtcgcggatcgagtcaccattcaagcaccttaataggtccacaataacgagctatctcgatgtttatattgcagaagataattatctgacggtattaattaccaatatgccaacccatgatgaccaacattatcatggttcatccatccaactaaattcatcattccacagtttacgtagaatatcgcatcataactcggagacaataatgccaataaccccaacttatcccggcgtttatattgaagaggacgcctcaccgtccctctccattcgctcgggtgcaacggcagtgcctgtttttgccgtcgcaaataataattcattaataccagacaattcctatattcgtattagtaactggttagaatatttaacactaaaaggtaagcaatttgatcccactaatacacttgatatcgcactacgcgcctattttattaatggcggtggatatgcttatctcgtcaaaaccacaaatctagaaagtcagatcccaaagcttgacgatgtgacactactgatcgccgccggagaagatattacgaccgctgtaggaacactttgccaattaggcaaaggattattcgctatttttgacggcccaacaacccaaatagcctcaacacaagcaccagatgatgtacttaaaccttatccagcaactcaatatggcgcagtttactatccctggctgactgctgaatggggagaaaataaagcctccattgatattccaccaagtgccgtcatggccggtatttatgccaatgtcgataacagccgaggcgtctggcaggcccccgcgaatgtccctgttcagggcggattacaacctaaatatccgatgaccgacgacctgcaagggagatataaccagggtaaggcactgaatatgatccgtacctttcctaagagcgggacgctggtctggggagccagaacccttgaggacagcgataactggcgttatatcccggttcgccgcctgtttaacagtgcagaacgagacattaaaaacgccatgagtttcgcggtatttgagcctaatagccaacccacttgggaagcggtgcgccgggcgattgataactatctccatgccctctggcaacaaggcggattgatgggtaacaaagctgaacaggcttattttgtgcaaatcggtaaagacgtcaccatgactgatgacgatatcaagcaaggcaaaatgatcgtcaaaatcggcatggcggcagtgcgtccggccgaatttattatcttgcagttcacccagaataccgctcaataattggaggcatcatgccaacaacaccgacctatcccggcgtttatattgaagaagatgcatcattatcgctctctatcagccacgggaacaccgcaatacctgtttttattggccgcttccagcctaaaaaagccagcgcaactctaaaagcgatacgtgtgagtagctggctggattttaccaatctgtttaatgtcggttgtattacgtcaatcgccatcacatcgactaaaccaacgccaacgccaccgcctcccccttctccttccgggaaagttgcaggcgatacagccactgccgatattgctcttgacgccgacgatacaaacacagattacacttacgctataaatacagttacctctacaaccagcagtgatgcgctaaaactttatttccaaaatggcggcggaccttgttatatcctgtccattgccgattcgggaaatagtgaaactacggcattactccctgaattaattgaacaagctttggagatcaccctaatcgtctgccctgaacaggattcttcttaccagctcgcgatatacaacagcctgccccccgcattattgaatgccggctatttcctgatcgctgacagccagggtaaaacaactaaacctacagttaatgtgccatcacaaactgcgacttattatcctgcggttaaaatctcacaacttatgcaaacggaagatagcctgatcgcagtttcaggttatgaagatgcagcatcaaacgaagtcaaaaatctggcacaactcaaacagaaaaactcaactgtctaccaacaagctgtccaagcaatacagggcaaaatgaaatccagcagcaacactattcccgccagtgctgtcatggcgggggtctactgcgccacggatgccagccgtggtgtctggaaagccccggcgaatgtcgtgctaagcggaattagtgatgtcactgaacgacttaatgacgatgaacaaggtgccatgaacctgttaggtattaatgctattcgctatttcaacgggcgtggctttgtcgtgtggggcgctcgtacgctgcaagatgatgacaactggcgctatattccggttcgacgtctctttaacagcgcagagcgggatattaagcaagctatgcgcaccgccgtttttgaacccaatagccagcctacttgggaacgggtgaagtcagccattgacaactatctctattccttatggcagcaaggggcattagcgggaaataaaccgcaggaagcctattttgtccagattggtaaaggcatcaccatgtccgacgacgacattaaacaagggaaaatgattgtcaaagtgggcatggccgcagtacgtccggctgaatttattatccttcagttttcacaaaatgtagcacagtaaccgtgctgagacgcggttgaacgccgcgtctattaagtcttacaaggagacgataatggagataaaacagccgggtgtcaccgtcaccgaaagcctgatatccccagaaccggatgatgtattcatcggtataccggtttttatcggttataccccctcgccggtcgataaaatcgctatcaagctcaacagtctggccgactttgcccggtcatttcctgaatcaggattaatgtactattccgtgcgccacttttttgaaaatggcggccagcaagcctatgtgctgtcactgggtacggagcaacaattaagcgatttttcgtcattgatcaccgcactgcaacaaacgtggattacccaagcgatttccgcggagaacgacattacgctgattatcaccccggatgctatccgatttaatcagacagaggtttcctatatccaacgtgatctctggttacaattttggcaatcagtgctcaatctttgcaaaagtcggcgcggcattatggggttattggatgccccggacaatcccacattagccgcagagtgtttaaaacagtttgcttccgcagatcaacaatggggtgccgtatactggccgcggctaaaaagcgcctatcaggaccaagcgcaaaaccctattgtgctttcacctactgccgcggtcgccgccgttatccaaaataacgataaccaacaaggcgtctggaccgcccctgccaacgttgcgttagccaaagtgatcagcccggtacactcttatattgaagcaaatgccctgtttaacccgagtggcacctcgctgaatctggttcgcagttttcctggcaaaggcataaaaatctggggatgccgaacgttagaaaatacccccggttccccctggcgctatatccaaatccgccgtctggtttcctatatcgaagctcatatgactcaactcggccgggccttcatctttgaacccaataacgctatcacctggatgaagcttaaaggccaagcctacaactggctgcgtcagttatggttaaacggcgggctacggggtactcaggaagatcaggcgtttgaattgctactgggtgtgggtgaatcaatgagtgaaaccgatatccaggccggaaaaatgatcatgaaaatcagcctcgccgtgttaattccagcggaatttattgaactgagcctgacatttgatacccgtaccggcaccacccgctaagttaaacagaaacaaaagttaaacagaggcaacatatgagcaacctctataccccgtcagtgtcacaccgttttatcgccagttttctttttaacaacattcccagtccattcgatatcgcctttcaacggatatcgggcctcagccgtgagttgcagaccacccaacacagccagggcggggaaaatgccagaaatacctggctggccgagaagatccagcatggcagcctgttgctagagcgtggcgtgatgacggtgactccgctcacgctagtgttcgatcgcgtcctgagaggcgaaaaagcggtctatgccgatgtcgtgattatgttactgaatgaacattcattacccacggcaagttggacattaagcaacgcgctaccggtgcgctggtccaccagcgactttgacgccaatagcaataccgtcttggtgaactcgctggaattacgttatcaagatatgcgctggttaggagtaaaagtatgaccgtcgaaattaaagaactgattattcaggccaaagtcactgattccacgagtaattcttcctcaccaccaaccttagcccaagagacgctggataatgcccgcctgattgaaatagtgaaacgggaagtgttagaagcgttgcgtgaagcaggagtccattatgagcctaattgaacggagtctatccaaactcaccctgaccgcctttaaagaccgagaagggaaaatttccgtaggcagtttacaggcgatgtataaccctgatgggattcagctcgattatcaaacccgctatcaacaggatgaaagcgttaataatgccagccaaagcagccgctacatgctatcgcaacccgccggtttgacattagttctgttgtttgatgcgactatgccgggcaacaacatcccggtagaaacacaattggcaaccctgaaaaccctgtgtgcggtggacgccagcaccagtgtgccccacttccttaaaatcaaatggggcaaaatgcgttgggaaaacaaaggctatttcgcttgccgagccactggtctcaccatccattacaccctgtttgaccgggacgccaccccgctgcgagccagcgccactttatcgctgatcgcggacgaaagcttggttattcaagccacggaacagcagttacaatcaccgccggttatcgcagtcaacgtgaccgatatgctctctctgccgttgattgcattaggcgtcagtgctgctctagttggtggtattgattatctcgccctcgccagacaaaacgatttggacaatctggatgatttcactcccgggcaaacgctacaggcacagggggacgcatgaagataccggcagtagacattaaaatagcgggaaaaaccctcagccagttttctgtgataagtttgaccgtcaaccatcaaatcaacggtattccctcagccaagatcactctcggcatagccggtgacgccaacgcaattttcgccccccaagctcaggctgaactgacaagctgtcggcccaaccaagaactgatcgtgcaactgcaagaaaccgtgttattcaaggggatcattgttcgacaagcacttaagttcaaaggtcaggacagtctggttaccctaacggcaaaacattcactgcaaaaactcactgacggtttccattcacagctattcagccaacagaatgatgaagacattatcagaaagctattcgatcaggcaaagataactgtcacgataaaacaggtgcctcagcttaaaattaaacatgagcaaatggtgcagtttcgctgtaatgactggaaattcttaaaaagccgactggccgccgccaatatctggctgttgcccggtaatgaggccgtcacattagcgacgccggaatcacttaatcagtcaaccgtgcatacaattaaacaacgtgccggcgatcaagacattgtgctgtttgaagcggatctgcaatttgataatcgacacagccccaaaacggtgagcgtacaagcctgggatatcacacaacaagaactgtctcaggccaatcaggcagaaaacagcggggttggcagcggtcaactcgcgtcagacagtttagcgacgttgaccgatcaggcatggcagtgggttttcagctctccccaagataatgaacaagccaaataccttgctcagggcatcctgaataacctgcgaagtgataacgtttccggcaatttcgaagttgcaggggatagccgttatcagccgggcgatctgcttgctctaaatggctttggtcaagggatggatggtcaaggcattatcaccggcgtcagtcagaccatcaatcaacggcaaggctggcgcacccggctaactttgggtttgttgctggaaacagaaccggtggtcccgcaggttaaagagctgcatgtggggattgtggaaaaataccaacaggacaagcagtcactggaccgaattccggtcaggataccggcgttagatttaaccaacagcgtgctttttgcccgactgggtaaaccttatgccagtcatgaaagcgggttctgtttctatcctgaaccgggggatgaggtgattatcggtttctttgaatgcgatccgcgctttccggtgatattaggtgctatgcacaacccgaaaaataaaacaccaatcgaacccagtgaaaaaaatccaataaaaactctggtcattaaacaaggggataataaacaagcattagtgctcaatcatcaagataaaatcgccgccattaatagcggagaacattcgttatcattgcaacaggataaagatattacgctaaagtcggcgaagaatattatcaccacaggtcagaaaattaatatacaggctaaggaatccctatcagccactggagaatccagcgtcgatattaaaggtaaggaaattaacctaacacaataataaggcaaccaaatgacaaataaaatattagccgatatttatggtcggggctggacatttccgccgcaattttttgtcaaagataattctcatcccaaaatacaaaccggcgtaacaatggcagaaggtgcagaaaatgttcgccaaagcatgaaaattctttttctcaccgagccaggcgaacggattatgcgtgaagattatgggtgcggtctaaatgattatctatttgctaatatcaatgatgaattgatagctgaaattaaaacccggattgaagagcgcgtactgcgctatgaaccgcgcgcggaaatcacggtgattcaggtcgatcagagaacagacttgctaaataccttacatgtccaggtgacttacgccctgagaggtagcgatatcaaccaacagcttgaaggcgtccttgaagtgaatgaaggccgggtacaggtgaacctatgagcaaacaactggtggtggatggcgacactctactatttgaacagtttttcggcaaccgacaggtgacaatcttggagccggcaactatccagggcagcgggcatgcacaaatccagaacaaaaaaattgccattgtgggcgatgaaaaagaggtaaagctccaagcgcagtatattactcccgattacccaacgcccggtacaggcatagtcaccattgcccagttagatgccagccaacaggcaaatttttgtcacagcccggccgcggtgattattgtcggtcagcaatttaccgcccgtttcactccgacacaaccggcgaataacccatcgagtggcccggatgtcaccacacctagtatgggaaaaggctattttattgccagtcaatatatcgtcaacgccggataaataacgcctttaaccttatttttaaataataacgatctcctgaaaaactatattcaaaccacaggtggtaataaatatgggacaagccgagttatataataagctctctgctatcgtgccggataatgcatttaaacttgatgaaagaagtgcactggatattttaaactggctcaaagagtacgccgcaattattcctttcgatcaagagaaaaaacagttctgggacagtttctactttacgcaggaaaatagcactaagcaattagcggatctttaccagaatgttaatcaagcgaatggtcttttaccggcacatcaagcttttgtattggcttttttaaaactgttagaaacacccaaggtattatttaataccctcccggcacgacaccgtaatctttattaccgggaattattaggactgaaccccaaaaacgctcaggcggatagcgttgctatcggcattaccctgaatacgaataacacggaatttctggtcgcacaaggcacgctatttgatgccgggcaagatagcgccggtaatccgttacactatgcatcaaacacggatttactggcgaatcagggagcattaaccgacttgcgttggtatcgaaaaaataacgatggttggcaatcggcaataccacttagcctctcagataacattaaattaccgaaaaacggcatccagctttttagcccaacagccaacgataccccggtgctatccggttatctgattacctcctctttgtttgctatgcccgcaggagaacgtcatattacattaacgctggaaaatgattggcagggtaaagctaaaaatatcaccgctaaaatcagcgccaaagatcactggttatcgttgtcggtaaatcttatcgacaaaaagaatatcaaactgggtttactctccactgatgatcctatcagcccgccagataaccttgacggcatgacattcgacgtaccggtattaaaattaggcaccattcaacaacccactttatccaaaattatcggtattaaaatcaatgttaacggcaaccgcagtgtgcgctatgcctctgatgacggaactgaacaaacagataaaaccagttttcccttcggccaattgccatcgttgggttccggttttaatctggtcgcccctgaatggtatggttctgaaaacgcgacgcttaccttgactccacaatgggttggcttgccgacaaagagttttaaagcgtggtataaagggtacacccctgaacccgataacagcgtatttaaagtacagggttatttagtcacacctcaggaaaaaaagaccattgatggcctccagtcattatttggcggaaccgatgcaccacaaggacaaagcctgacatttactttaccggcaatgaactaccctgttgcagacagtccatcccccaatgactggcccgcgtcagtacgcatagaattggcagggcaggattttatgcatgcgcaataccggcaagatccgaccggtaaaaatttaccctacactccgcaaatcagtgcattacaagttacatttaacgccacaatgaaagctgaacaatatgccgtgtatcctctcaccccttttggttggggaaatacgaacgctgaaacgccttcattcgctaatgacgcactctatttaggcttcaccaatgtgtcaccgggacaaaccttatccctatactggcaattggtcggtattcaagaacttgcgctattctggtcttatctgaatcaacaaaacacctggcaaccattaaaccaactggttcacgatcaaactcacaacctgtttgaccgggggacatggagtacgctgttgccacaggacgcatcaaatcaggcagccttgatgccgatagggcgatattggctgaaagcggagataattcagcagaccgcccctgagaattacccaaaaatgcaaggcatactgtataacgccaccactgccacactaatcaacgcagaaactgttgaaaatgatcattttatcaatggattggccgccgacagcattaaacagaccgtcagcgcgtccgacgccatcagtcatgtgacgcaaccctgggcatcctggaacggtcgtccgaaagaaacagaacccgcgtttctcgcgcgaattccacctcggttgtcccatcgtaaccgtgctttaagttgggataacattgtcacgctactgaaagagcatttcatcagcatatttgatgtcaaatatcccgacgccaataaattaactagaatcccggcaccgaaagaacaacaactgattgtgatccctaacagccgttacaaagataacgatgatgcgctgcgcccaatgctcaacgctgcccggctgacagaaatggccaaatggttaagccagttaagcagtccctggaccacgcttaaaattgacaatcccagctacactaacgtgctgatcagttatgaactggtgtttgctgcggggattaatcccgattttggtcatcatcagttacagcaagaactcagccggaaatatatgccgtgggcagaagacgctgcaattagtgtaaccaccagtaatcgccttgattactacccgttattagccacgattcaacagtcgtctctagttgaacgagtcaccagcttaacgttgaaaaaatccacccaaaccacagaagcagtgggtgacagtgtagaagctggtgataatgaagtgctgattttagtttggtcaaaaaagaatccatcaaatagaggagctgaccatgagtaatcaagacgccctgttttccatcgttaaagacaatattgcctttgatactttactcactcaagctaagacagtgattgagcaacaatccggccaactttggagcaatacaggtgaaagcgatcccggtataactttattagaagcctgttgttatggcgcgtctgatttggcctatcgcctttcgctgcctctcatcgatctccttacccctgaacagcaagaacagacaccgggcgacggcatttttccacaggaattcggcccacaacaaatgctgacctgcggcccaattactgcggaagattatcgccgggccttattggatttgcatagcagcgataatattaacaacaaaagtgaaggttattttttctttaacgatgtacagctagttcgtgaacctgagaatcaacgctatgaatactggtataacaaagaaaaacgtgaatacagtttcactcaaactccagacagtcaacagttgacactaagaggaaactactggctttatttactcccgaaccgggaaactcagactgacaatacactggctcaacaaaatctggccgctttcttaaaaaacaaccgtaacctgggggaatctgtcagtaaaattatctggctacaaccgacggatttcttattacagcttgatattgaactgaatgatgatgttaaagataccgctgacatctttgctaaagtctatatgacaacagaacagacggtattagcaaaaccattacgttataccacccaagccatgaaagaatcaggttacagtaatgaagaaatatttgccggaccctatttacatcacggctggatacctgaattgcccacggccaaagattacaccacggctacagaattaaaactcagtcacttagttaatcgcttattggctatcccagggatacaaaatattacccggttagcattagataaccacgataaaaacatttccccgctgtcaaatgacaattggtcttggacaatcgctcagggctattaccccagattatggggtaatgatccattaagcttaataacttcaccaacaagcccgctcattattactgccaaaggtggaataaaagtctccatttctaagcaagatatagaaaataagatcattaaagcgccattaattgaaacacagccagagttattaaactggggaaaacatcgtaagatcctgaactactatccggtcagcaataaattgccggcttgctatggattacaaacctacgctgagacccaacaacaaatccacttgcatcaatttatgctgccttttgaacaaatgctagctaatggctgcgctgaacttgccatcttgccgaaactgttagcctttaaacaacggggaaatgcggtatatggcgcacaatggccttttaaagacaatactgttggttataaagtccaccagcaaatcatgcctaatttaatcaaacagctaaataatgatgcccaaatcaataatgatgacggtatgcattggcaaaactatgcaaaagaattgttaatcctgaattatttgctggagtattttggtacccatcgcgcagccaggccacttaccatagactttctggattttctctctactcaacgtggttatttagcacagcaacccgaattaacctatcaacgtaataatatccgtattgatcaagtgtcagcactacaaaaacggattgccgcccgtattggtctgggaggagaatgtttcaaagaaaaacccaacttggctaatctacctttctatctaattgaacatcgtcagctattaccggtcaaacctgacaataaattcgatagtgaacagaagcccgataagctggaaataaaaagcgtacccaattctaaaaaccaacaattaatcattacccaaaatgggacaacgggccagctattgcatggtcaggtcattaacttgattattattgagggtgacagagaatttacactacgaggccaaatgattaccgatattacgggagataccttctcgcttgacactctcaatagcactgatttagagcgcaatctaaatcgagtagaacaagcatttgagcaaggtaatttacgctggcgcaatagcccagtatggatggaagatatggattatcaactggtttatgccagtgacacatatcaaactggcgcaagagatgaacgctggatcacctctagcacccaaagcccctttcccgccatgatcgatgtgaatgacgaaattacgctgaaatatattatttcacccgatgagtcatccacaaaaatattggctaatagtaattctcccaccgattatcagcttaaagcacgcgtagtccaattcgaccgaattaagggctggatattaattaaaaaaatatcagggcaacaatatgatttcccaaaatcagaagacgcatggcgttatcgttggtacttttccaatgaaaaatacgcattggctgaccgcttttcatttatagtcagtgtagtgattaatcgtcagcttattgagaatgataagatcgacccttataaactggaggcgtgggtaaaagtggagatcttagctgaattcccggcacatctttccatgattttccattggctatcaccggaacaattcaataattttgctgatacttataagcgttggcaaaacaatggcgcgcctctgggtgatgaagcctataatattttagaaaccttaacgttagggcgtttaccttcagcggcaaccggtacgggtaatatgcgaattgccaccgaacagcaaagaatagaggtaattggtgagtcaggtaccgaatggaatgaaaaggtaataaaagacaatcagttattatatgttccaaaaatctaacctaagattatatagcaccacaaaaatagtcatcaatttcattgttaaataaaatatcctctctgattgccattttgtgatatggcagtatttaaatgatatttgaaaaaaatcaatcaatattatatacaaggtaattaaaatggaaaaagaatataatctatccaatatagaaaacaccaatcctgaatcaataggaccttcagtagatgcattaaaaaatcgctttaaagaaggcagtatccccctacaaactgattattcagacctgattaatattgctgatatcggtcgccaggcagttggtaaagcacccaatcaaatcgataatccaaattcaggcttagtgctgaataatgatagtggattagcagtaaaggttaacattagcggcggtttacaagcggataaagatggtgtcagtgtaaaaatcaaggataaaagcctattagctgataataacggattatcagtaaattatggcaaagggttacaacttgataaagataatgacaataagcttacaatcaatagtcatgacggtattgaaatagttgccggaggtgtaaaagttaaagctgggaatggtatcacggttaattcaagcggcgtcagtattgatcctaacacagtactccctagaggaatgattgtaatgttttctggtaaaagtgttcctacaggctggacattatgtgatggtaataatggcacaccaaatttaattgaccgatttattttaggaggaaatttttctggtattgatggaaagagcagtactaccgtttcaggtcctaaagacagcaaatcatttaattttaactctaatgaagctacattaaatatcaatggtaaaacaagtgagagatcattatctattggacaaatacctaatcatagccatcttagtggaataaatattgatacaaatatcatggctcaatatggcgctactcagatcggcaaaacagatagagctgtagcctcatcaaagaataccagcgagagatatctctattattcatcaggaatactctcctctaatggaacgatcggccaaaacagtcctgaaacacacgatcatgatattaatttaacaaacacaggcaatcatttccacaagaaccaaataacaactccttattatatacttgctttcatcatgaaaacttgaaatttactaatcaattaaagttttaattatctattaatcacaaaggatatactaatatgacttcggagccaaatctgttaacccggattaccattactattgaagctaataattcacaggtggctaaaaaagtattacatggctccctgtttaatcaaaccaatataaaaaatttatttaatacattctttactcaatatcccattaatcaggatatctatttagaaacattaactctggatcttggtgaaataaatttacataatttcaattcactattccctgtaagacttaatattgcactaaataaagcattaaaccaatatcaaattaataatcaggagagaaaaatatccctaataaaatcacaatcacaatcacaatcacaatcacaatcacaagaaataaccaacaaaccttatttattatatgtcaataactcaattaatattgaagttttcattcattatttaaatcaaaaaaactccgcattcaatttagtagagattaaaaataatcataaaaatattgatatcaatattcaacaattaattaatcaattagctggaatagaagataaatggactttgtttttagcaaaaagctgtttatctgaaccaagtctgcaacggttattagcgctcaagcaacccgccttattaagcgctattaacaacagactatccgaaggagtaaacagatcacaatatttgggggagcctgtctcccccggacaactgatactcaatgcgttgcaatatatacagctaaataatacacaggagatacctaaactggatgcgaaagtgctatcacatatcacctctgaattagataacggtacacttaatgcaacatctattattacgttatttcgccagattattactgacaatattccattaaataattggttaaaacagatctggcaaactattactgttgcaaaatttagtaaaaaatatctatcagctaaagaatatcaatatttatctgagcattttatttcagaccatgcagataaagataaatctagcaagaaattagccgtaactcatgttgatattaaaaatgttcatagatataaatattcaataaatcaggagacaatatcagagaaccagaaaatattttcagcatcgaataacctacatattacaggaaataactctaacccattacagactaccaataaagcacgcgataaatcggttttattatccgaacaaactcttccctatcaggtaaataatgcggggatattggttttatggccgatgctacccgcattatttaatcaacttggcttacttgaagaacaacgatttattcatcatcaagcccaatttaatgcggttaatttacttaattatctgattttgggagataaagaagtacagataaaacaaaatatattgaataacgttctgtgtggattaatggctgacgaagtgattgaattagcccccactgaaccagaaaaacaattgatcatagatcaatggctagatgccgttatcagccaacttcccggctggaaaaaattaacccacaatgacgcgcggcaactgtttttacaacggcccggtcagttactaatagacgaaaaggaaatcaaaatcacggtacaacatcaaccgtttgatattctgttagccgattggccgtggccattaaatatcgccaaacttccctggctggattgccctttaaatattgactggcaaaacatttagaaggtttatatggactacctactgacaaataccccctgtattgtggctgaatcacactggatttatccccatttggaacgtatcgatctactattacagcaatactattataaaaagagcgaccagtacgattcattaccggaaagttttttattgaccgaagatgaagtcgaacaatgtttaatatcaccgcaaggagttcctcattggttaactaaagtcaataatcctatttgttatccagaaattaaggaaaacccttcccttgatgcattatcattgttggtcgaacgttttgaactgactgaatttgagcgtgatgttttattattaggtttattaccccattttgacagtcggtatcatgcgttatttgccgcgctaaatggcaatagtaaaaaacagtggcccaatttcgcattggcgattgagttatttagccaacaccaaaatgactggcaattactacaaaacagctttttaccgcaaacaccgttaatcaataaccaactattacggcttaataatcacgaagaagttatttggctacaaacacaattcttaactcataacgctatctggcattttttatcgggacaacgaacacttttaccacctttgataagctatgctaattggcatactcccgcctcacataattggtatccacaaactctttatcattcactggaaaagatattattgaatgaaaccgataaaatacgtccattggtcatactcagaggaaaagaaggcagcgccagagaattagcggtcagtaatattatggcatatcatggtattcataccttaatccttgatttagcctgcctgcccgatgaagaaaacagtgtcaaaatatccagcttattagcggatgtaatacgggaaactcggttacatgatgcctgtttattaatccgcaaattctctttgcttgcagcggaaaagaaaatattacaccacgaattatctattttactgaatcagccaaaattacgcgtggtttgcctggtagaatcgggaaatggattagcttggcttaaacatctaccaatggtgcaaattgacatgccagtaatgactttagcagagagaaaaacaatactgaaagcaaatttaccggagaatgtcgctcaggaaatcaatattactcagctctgtcagcgcttttcctttaccgcggaaacattaccgctcattcttgcagaagctcatcaatatcaaataattcgacaaccagaagatcaaataaaagaaatagacctgcgtaaggcattaagttttcgcgcccaacagaatttcggtaaattagcccaacgcataaccccaaaactcagtttcaatgatttagtggtttcagaaacattagcgcaacagttaaaagaaattatcgctgccattcattaccgtgaccagattctaagcgcaggatttcaggaaaaaatcagttacggtaccggtattagtgcattattttacggtgaatcaggtaccggcaaaacgatggctgctgaggtcattgctggttatcttggggttgatttgattaaagtggatctctctaccgtggtaaataaatatattggtgaaacggaaaaaaatatctctcgtattttcgatctggccgaagcggattccggggtgctgtttttcgatgaagcggatgctttatttggtaaacgcagtgaaaccaaagacgctcaagacagacatgctaatattgaagtttcttatttattacaacgtctagagaattatccggggttagtgattttagccaccaataaccgcagccatttggacagcgcgtttaatcgccgctttacctttattacccgttttacttatcccgatgaagcattacgtaagaaaatgtggcaaaaaatttggcctgaacaactgacattatccgatgaaattgattttgaacatctggctaaaagatctgatttaaccggagcgaatatcagaaatatcgccttattatcatccatattggcagcaaatgacaatattggacagattgaaaataaatatatagaacgtgccgtgatacttgaattaaataaaactggccgcttggtattttaaaaattaagtagaattggagtcaatatgacaactataattgcttctgacaatgcgattattgagattaatcaagcattaaatgatattctaattaaatatttagacattcccggtcaaaacattgatattcgttttgatctacccgaaattaattccattcaatcagaaccgacagtcagtgtatttctttatgaaatacatgaagatctacaattacgctctgccgaatcaagacgttataatccggcaaccaatacattattaccgggatgggtaaatattaactgcaattatttaatgacttactgggagccgaataaaccatcgaacgacagcgccagcccggacagccagccagataatcaggcggcacaagtcatgacgcgtgttttaagagcattgattaacaatcgccaattaaccggtattcccggtgcttatacccgggttattccccaacaggaaaatttaaatagcttaggtaatttttggcaggctcttggtaatcgccctcgcctctctttactttattccattactgtacctatgaaactgaaaaatattgaagacaatgtaatcccagtcagtaaaatatccgcttctgtggatcaaaaacccagtctggataattcacaaataaaccaagctttaatataccctatggatttcaagatgcatcgcgacggcaagggagtgaatccccgggagcatagataactatgtgaccggggtgaacgagtgcagccaacaaagaggcaacttgaaggataacgggtatagataaattatgcgtggaattaggcgatacagaagatgtgcgtcttgcccttgctaaagtgaatctgacaattgaacctgatacagaaaacaatcaaaacctggaaaatcaaaatgttattgttaaagtttcgggtattactagcgtaacttatttaccacaaataaaagatacacttaccaaatggaaaagcagtcaagaggctattgttaagataaatggtgtcggcattgttgtttctaaagaaaatgcggataagttaattgggatttaaaattaatttttatactaaaataacaaacaatcattcacctaataaataattatttattaaaattaattatttttaatatttttattttattttcccgtgttaccgtgttagtgttaataaaactaaaacagtgaaacactaatttaatccatatattatttactattcaatcaatccaatccaatccataggtggtaatatcatgccaataaatgaccttaaaaaaaaattcgaaattagccctcaagcagctcaagctattggtgctcctgcaagatcaaatagcagtaaacaagctgagcaccaaactgaacaccttgaacttgatacatctaaaaatagaagagatagaaaagatttaaatgcacaagccaccccaaatcaacagcacaccaaaaaactggaaaccgaagtaaataatggtggcaataaaagtaaagcacaggcgcatacaccagatttggtgatgaaaaaagaaagctcagtaacaccgaacactcgcaaaagtccgaatgagaaaatcaaagctgaagatattttccatcggtataaagatagattttctccttccgatagagaattaccatttgaaataatgaatgaaatcaccaataatggaatagcattctcctctgaaaaagcacccgaaagtcatttagataaagtaaaagataagaaattcacgctgaggcattatacttctggaaatgggcaggaaaaacctacatttaatgagattggatcaaactttaatttggtaaatgaaggaataaaaacattaaagcgtactcaaggaagcaacactaatgaagatgattggaaccgtctaggaaatacggcatttactttcttcttgttagcaatagatggagaagtatctgatagaaaattcctgtctaatacgactcactttgcagaaattgatatagaaaaccctgctgaacttaaagaacttgggttagatgaaactgagttctttgcttctcctgatttgcttcacgaaaaaaatctttcccaagcccctgctgtaaaagggaaactatctgacttaaaatcattattattaaaacaatctggcataaaaccagttcaattacagtctttaggtgcaaaagggattctggaacgtatagatagtaagtttaatggcagtcttgaaataaaaatcccaggaaacgtgaaagtgaaggaatggaaaaaagtcgagaaataaaaatttaatcatcgatattttattatcatctcttttcacacattttttcaccaaaatattaataggagataatatgttatccacagaaaaacacaataaagatactaaacacccaagaaatagagaaaaaaaattctcaatacaaccagaaaactctactcaagatgatgaggatataaaaaataattccttaggagttgggctagatttagatcaaatgataagaaatacgtcttccaccttaacaaatgcccctcaaaaacccgaagatggatattactatcatatttccagaggaaataatttacaaagcttcctacaaaacggatttaaaccgcaaggctcacctggcccaaccttatctgaagaagatttttcacgtagaaaaattggtatcataaagcttatctactctattatagccacgactattaataaaaaccgtaaagcaaagaaaatctctaaagataatttccttatgcctcaagaattttggcatgagttcaaaaatttttatcagaacatccccactcaaacaaatatcgatgatcaattattaaaaaaatccattacggaaagtatcgacaaacttgaccaaaataaatttatggagaagcacagtgaccgtaagcaaactattatcaacaatgagagagaagctattctgcaacaagatgaaaggattaacgaaattatttcaagcagagcaaaaatgatacagcaacgagaagctgaaaatacagaaggatatatctatcttgccccacacaaaaacacacttttggaatatatgaaacatttacaggaagaaaaaaatctatttcttatattagcagtcaaagaggacatattcaccgaaaaaggattagaacaagatccacaagaacctcatggggccgtcagatataagggagcattatctacagaagaacttaattttgttaatcaagaaggtcaaatctgtgcaatacctgcatctattggggaaatggattatggcgattttattttaaatcagcagcaagtcatagatttttgtaagaaataaaatgagggtaaatataatttcaaacataaaattatatttaccagagatagaaaccctacactttcggctcacataaaaggtggaaagaaaaataacttacgtgaaaagctattttttaatgaagacaaagatgatagaaaaggaagttattataaaagtaagccaatacatatcaaagatgtcagaaaaatgacctatcaggagatggaagaaattattaattccccggattatcatgttattttaggctatttttttagtcgcaatgatcaggctttgcgcttttataccaatacaaatccagtaacaagttatgttgataattaacctgaacttcgattaagagggaaattcaagacatcacagtccgctcagtttcttgcttaatattcattcaatataaaagaaagtatgctattattcacctatgaagaaaaaaaacacaccaacgccacatgacgctattttcaaacagtttttaagtcatattgatacggccagagactttctggagatacatttgcctgcgacattacgggcagtttgtgatctggatacattgcaattagcatcagggtcgtttattgaagacaatctgcgtgcgcattattccgacattttgtattcactgaaaacggtgcaaggtgacggttatgtgtactgcgtgatcgaacaccagagttccccggacaaaatgatggcatttcgattgatgcgctatagtatttcagccatgcaacggcatctggagcagggacatgaaaaattgccgctggtcattccggtgttgttctatcacgggaaaatacagccgtatccctggagtaccaattggctagactgcttcgatgatccagctctggcgaaggagctctattccggtccattcccgttggtagatgtgacggtaattccggatgatgaaatcctgacgcataaacgggtcgcgctactggaaatggtacaaaagcatatctggcagcgtgatatgatggggtcactgcaaaaactgtccatattgctggcgtatggttaccatacggaagagcagctaaaaagcgtgctaaactacttattacaggcgggagataccgccgatccagagggttttatccggcgactggcagagcagtccccgaggtatgaggaggtactgatgacaatagcgcaaagattggaacataaagcacgtcaagaaggacaccaagaaggacgccaagaagggcgtcaggaaggacgtctggaggcaacgttaaaaattgctcatgcattgctgaacagcggaatcgatcatgaaacggtgatgaaaaccaccggtctaagtcagaacgaacttgagcaaatacgccactaactcgtgctgggaattctttcagtattcaacgattcgtgttaaaagaaaatcttacggtgactggcaaaacagtcaccgaagtatgaatctcgaccgtgaaacggtgatggaaatcaccagggtgaatttgaacaaacgtccgacacacttactattaatacgttatcggcataaaaatgcttgagtcaatgcacaaaacgcatagaagtggcacatttacatgccaaaccaaagactgggtttaaatccacgtgcttctgaaatcgctgttctctcttttcaccccaataagcattctaactcatttcactagcaatcattttcatgattatatttttattcaacaattaatttatcgttgaaattattaaagaataaaaatacctggcaatgaaaaaccccataatcgcgtgatattattcaacatgaaaatcacacctgttatttattttcatgtttacagaaagtaataaattaacgctgatacacaaaatcatcaaaacccgccacatcaattaaaaataaatatcattattaattgatgctaccgcttaagaatccattctctataatcacctcgctttatcaaatgtgatttaaataatcattgaacacattctttaatacgaacaaagacctccataaatcaggttattgcggtagctatacccaatcgttagatgctaaggaaaacaaagtaatagatgtttttcttatatttcaaatgtaaacaatcaaggaaaaaatcatgtctacaactccagaacaaattgctgttgaatatcccattcctacttaccgatttgttgtctcgatcggtgatgagcaaatcccttttaacagcgtttctggcctcgatatttctcatgatgtcatagaatacaaagatggtaccggcaattactataaaatgcccggtcaacgtcaggcgattaatatctcactgcgtaaaggggtattctctggcgatactaaactttttgactggattaactctattcagcttaatcaggttgagaaaaaagatatttcaatcagtttaaccaacgaagccggcactgaaattttaatgacctggagcgtggcaaatgccttcccaacctcattaatttctccttcttttgatgccaccagcaacgaagttgccgtgcaggaaattaccctgaccgcagatcgagtgaccattcaagcggcttaagattcatttatcaagctgtctactcagaatattgcacaataattggaggcaacatgccaacggtaccaacctatcccggcgtttatatcgaagaggacgcctcacccgcactctctgttcagtccggtgcaacagcagtacctgtctttgccgtcgcaaaagacaattcattaataaccgatgattcttatattcgtgttaacagctggctggaatatctgtcgctcaaagggggacaatttactgccaccgataagcttgatatcgcactacgcgcttattttattaatggcggtggatatggctatctggttaaaaccgcagagttagaaaaacatgtgccaaaactcgatgatgtgacattgctggttgctgccggagaagaaatcatcactgccgcagacgccctttgcaaatctggcaaaggattattcgccatttttgatggtccaatcgctcaaataaccccagaccaaaaacccgatgacgtacttaaaccctataccgctacagcctatggcgcagtttattatccctggctgatcgctgaatggggagaaaataaagccgccattgatattccacccagcgccgtcatggccggtatttatgcccgtgtcgataacaaccggggtgtttggcaagcgccagcaaatgtcgctgttcaaggcggattgcaacctaaatatccgatgactgacgacctgcaagggaaatataaccagggtaaagccctaaatatgatccgcacttttcctaagagcgggacgctggtctggggcgctcgcacacttgaggacaatgatcattggcgttatatcccggttcgccgcctgtttaatagcgcagaacgggatattaaaaatgccatgagtttcgcggtcttcgaacccaatagccaacccacttggaaagcggtccaccgtgctatcgataactatcttcacaccctctggcagcaaggcggcttgatgggcagcaaagctgagcaggcttattttgttcaaatcggtaaagacgtcaccatgactgatgacgatattaagcagggcaaaatgattgtcaaagtgggtctggcggcggttcgtccagccgagtttattatcttgcagcttacacagaatatcgctcaataaccggaggaaatatgccaacaataccaacttttcctggcgtctatattgaagaagacgcatcactggcactttctgttagccagggaaataccgcaatacccgtttttattgggcgtttcttaccgaaaaaaaccagcgcaacacctgaaataacccgcgtgagtagctggttggattttactaacctatttaacgtaggttgtgttagatcaatagcaatcacatcaaccgaacccacgcctcccaaacccgaaccgactcctcctgaaaaacctcaaacagtcgaagacgatgtatcagtcaaaaacaacgaaggagttgaaaacgatacagaagttgcggccacgacacaggccacaacacccaatgcagatgaaactcctcccggctacacttaccaggtcgccgttgatatctacacagtaagcagtgatgctttaaaactttatttccaaaatggcggcggaccttgttatatcctgccaattgctgataccagcaaggctaacacgctggcattaatcccggcgttgattgagcaggctttagaaatcacgttaattgtctgtcctgaacaggatgctgattatcagagccagatatataacaacctgaccccttcattattaaataacggctattttcttatcgccgataaccaagataaagcaaccgctatcagcgctaatgtctcctcacaaactgcaacgtattatcccgcagtgaaagtctcacagctgatgcaaacggaagaggctctcgtcgctgtttcaggctataaagatgccaatacaaccccagacaaagtgactaatctggtacagctcaaagagaaaaatcccgatgtctatcagcaagcggtgattgcaatacagaacataagtaaaacgattcccgccagtgcagtgatagccggtgtctactgcgccaccgatgccagccggggtgtctggaaagcacccgctaatgttgcgctgagtgggattagtgatgttgcggatcgactcacggaagatgagcaaggcaccatgaatcaaaatggtatcaatgcgatccgttatttcagtaacaaaggttttgtcgtctggggtacgcgtactctgcaaaatgatgataactggcgctacattccagttcggcgtttatttaatgcggcagaacgggatatcaagcaagccatgcaatttgccgtgtttgaacccaacagccagcccacctgggaacgcgtccgctcagcgattgataactatctccatcaactctggcagcaaggggcactggccggtaacagcccacaggaagcctattttgtccagattggtcaaggtgtcaccatgtccgacgacgatattaagcaaggcaaaatggtggtgaaagttggcatggcggcggtccgtccggctgaatttattattctgcaattttcgcaaaatgtaacaccgtaaccgtatggggcgcggttcaccgcgcctgttctagtgaggaaccgagaatggaaataaaacagcccggcgtcaccatcacggagaacctgatatcccagcaacaagatgaggcatttatcggtgtaccggtttttatcggctatacccaaccggctaaaaacaatcatgctaaaaagaatcatgctaaaaacaatcgtattagtgacaaaacccccgtcaagatccacagcctgaccgattttaccctgtcatttggtgaatcaggattaatgtactattccgtgcgccacttttttgaaaacgggggtcaacaagcctatgtgctgtcgctaggatcggataaaccacgaggcgattttcaatcattgactaccaccctacaacaagattgggttaaacaagcgatttcggcacagagtgctatcacgttgattgtggttcccgatattgtttatctgaatcagatggatgctcccgattcagaaatcgatcaacacgataagattctattctggcaacagttttggcaatcagtactcaacctttgcaacagccgacgcggcatcatgggattactggatgcccccgatgatcccgccctggccgctgaatgtttagcccggttctcttccaatgatcggcaatggggtgccgtatactggccaaggttgaacagtgcttatcaggagcaaaatcagcctgttgtactttcacctaccgccgcagtggccgccgtcatccagcgtaacgataaccaaatggtcgtctggcatgcccccgcgaacgttgcgttagccaaagtcatcaacccgatacgctcttatattgaagctgatgacctgtttaatcagaacggcacttcgttgaatctggttcgcagcttccccggcaaagggacaaagatctggggatgtcgcacgctggacaatacgcccggttctccctggcgttatatccagacgcgccgtctggtttcttatatcgaagcccatatgactcaactgggccgggcctttgtgtttgaacccaataacgccatcacctggatgaagtttaaaggtcaggcttacaactggttacgtcagttatggctaaacggtggactgcgcggtacgcaggaagatcaggcatttgaggtgttactggggattgacgaatcgatgagtgaagcggatctacgggccgggaaaatgatcatgaagatcaggctggcactgttaattccggcggaatttatcgagctgaatctgacatttgatacccgcaccgggatcacccattaaacaggggcaaaatatgaacaatttatacaccccgtcggtatcacaccgttttatcgccagttttctgtttaacaatatccccagcccactcgacattgcctttcaacggatatctggcctcagccgtgagttgcaaactagccaacatagtcaggggggagaaaacgccagaaatacctggctggccgagaagatccagcatggcagtctggtactggagcgcggcgttatgaccgttacgccactcactctgacgtttgaccgcgtcctgcgtggtgagaaagccgtgtatgccgatgtggttatcattctactgaatgaacattcagttcccgtggcaagctggacgctaagtaatgcgctgccagtccattggtctaccggggattttgatgccaatagcaatacggtgctagtcaataccttggagttacgttatcaggatatgcgctggttaggagtgaaagcatgaccgtagaaattaaggagctgattattcaggctaaagtgaccgattcagccagtcactccagcacaccacgcacgctggcgcaggaagcgctggataacgcccaactgattgaaaaggtgaaacaagccgtgttagatgccttgcgtgaaacaggaggccattatgagcttaattgaacgcagcctgtccaaactcaccctcaccgctttcaaggaccgcgaggggaaaatctcggtaggcagtttgcaagccatgtataaccccgatgccatccagctcgattatcaaacccgttatcagcaggatgaaagcattaacagtgccagtcaaagcagccgctatgtattatcccaaccggcgggtctgtcattagttctgttatttgatgccaccatgcccggcaacaacaccgcagtagaaacgcagctggcaattttgaaagccctgtgtgccgtggatgccagtaccaacgttccccactttcttaaaattaaatggggcaaaatgcgttgggaaaacaaaggctattttgcttgccgtgccagtggccttagcatcagttacaccctgtttgaccgggatgccacgccattgcgggccagcgctaccttatccctagtggcagatgaaagctttgtgattcaagccaccgagcaacagttaaaatcaccacccgtcaccgcagtcaatgtaactgatatgctttccctgccgttgatcgccttaggtgccggcgcttctttggctgggggtattgattatctctcgctggcctggcaaaacggtctggataatcttgatgacttcacccccgggcaaacactgcaagcgcagggggaagcatgaagatacccgcaataatcatcaaaatagggggtaaagccctcagtcaatttacggttatcagtctgacaattaaccatcaaatcaatggcatcccctcggctaacatcacgctggggatcgccggtgatgccagccatatttttgacgccaaagcgcaagctgaactggtaagctgccgtccgaatcatgagcttagcgtgcagatcgaaaaaaacgtggtgtttaaggggatcatcgttcggcaaacattggggcttaaaggtcaggacaacctcattaccctaaccgctaaacactcgttacaaaaattaactcacaacttccattcgcaactgttcaacaaacaaagtgatgaggcaattctcaaaaaactattcagtcaggctggtatccctgtcacgataaaaccagcgcctcagcttaaaacggtgcatgaacaaatggtgcaattccgctgtaatgactggacgtttctaaaaaatcggctgctcgcgacccatacctggctgctgcccggcaacgatagcgtgacgctggtcaccccggaatccctgaaccggtcaaccgtgcataccctccaccagcgagccagccatcaggatgcggtgttatttgaagcgaatctgcaatgggataaccaacgcagtcccaaaaccgtgagtgtgcaatcctgggatatcgcccaacaaaaactgtctccagcccatcaggcaaaaagcagtggtctgggtcgcaatcaacttgccacagatagtctgacatcattgaccaaccaagcatggcaatgggctttcagctatccattggacaatgaacaggccaaacagcttgctcaaggtatcctgaataaccgccgaagtcacaacgtctccggtaattttgaagtcgaaggcgataaccgttatcaaacgggggatgtgctggcgttaagcggctttggtcaggggatggatggtcaggcgattatcaccggtgtcagtcacaccctcaatcaacggcaaggctggcgtacccggctaacgctggggctattaccggaaacagagcaagttgtaccaccggttaaagagctgcatgtcgggatcgtggaaaaataccaaaaagataaccagtcgctggggcgtattccggtcaaaatcccggcgttaaacttaaccaacggcaccctttttgcccggctgggtaaaccttatgccagccacgaaagtggtttctgcttctaccctgaaccgggagatgaggtgattatcggcttctttgaaggtgatccacgcttcccggtgatattaggctcgatgcacaatcctaaaaacaaagcgccattagaaccgagtgaaaaaaatccggtgaaaaccttagtgattaaacagggagaaaatcagcaagcattactctttaatcataaagataaaacactcgcattgaatagcggaaaacataccttatctctgcaacaggataaagatatcacgcttaattccgctaagaatcttattacccatgctcaggaaattaaaatagaggcgcaaaaatctctgtccgccgccggtaaatccggcgtagatattaaaggtgcgaagattaacttaacccaataataaggtcatgagatgacaaacaaagcactagccaataaagcatcagccgataaagtattagccgacatttacggtcggggttgggcctttccgccgcaattttctattaaagatagtacgtataaagatagcacgcatcctgaaatacccacgggcgtcaccatggcggaaggggccgaaaatgtccgccaaaatatgaaaattctttttctcaccgaacccggtgaacgaattatgcgagaaaattatggctgcggcctgaatgattatctgtttgccaatattcgtgacgaaatgatggcagaaattcaaacccggattgaagaacgggtattgcgttatgaaccccgcgccgatatcagcgaaatccaggtcaaccagagaaccgacctgcccaataccctgcatattcaggtcacctacacgctgagaggcagcgaaatcagccagcagattgaaggcgtcctcgaagtgaatgaaggccgggtacaggtgagtttatgagcaaacaactggtggtggatggcgatttcttgctgttcgaaccattatttggcaaccggcaagtcaccattctggggctggcaaccatccgcggtagcggacacgcccaaatccagggcaaaaagatcgttatgatcggtgatgaaaaaaaggtgcaatttcaggcgcaatatattactcccagccacccggtgcccggcatggggatggtcaccattgctcaattaaatgccagtcaacaagtcaacttttgccgcagccctgccacggtaattgttgtcgggcaacaatttatcgcccgatttaccccaacccaacccgctaataatccatcgagtggcccggatgtaacggtccccagtatgggtaaaggccggtttattgccagtcaatatgcggtcactgccggataaataacctcttcaactttattttaaataacaggtgatataaatatgggacaggccgagttagaaaataaactctctgctattgtgccggatactgcatttaaacttgatgaaagaagtacgctggatattttaaactggctacaagaatacgctaaaaaaatccctttcgatcaagagaaaaaacagttctgggacagtttttactttattcaagcaaataatccgcaacaattagcggatatttaccaaaatgtaaataaagccgatggccgattacccgctcatcaagcttttgttttggctttcttaacgttattagaaacaaccaaccgattgttaaatacctttccggcccggcaccgtgatctttattaccgggaattattggggctgaaacctaaaaaagcccaagcggataaggttgcgctaggaattactctcaatcctgacagcacagaatcgttgatagctcaaggcacgctatttgatgccgggcaagacagcgctggcaatccattacactatgcatcagatacggatttactggcgaaccaaggggaactgaccgacctatattggtaccgaagagataaagatggctggcaatcagcaaccccactgaaccactcagataatttggcattacccgaaaacggtattcgactttttagcccaacatcccatgatactcctgtgctgtccggttacctgattacctgctccttgtttgccatgccggcaggagaacgccgcattaaagtgactctggcaagcgaatgggcgggtaatactgatcacatcaccgctacaatcagcgctggagatcattggctctccttgtcaataaaatctatcgacaaaaccacgatagagcttggattatcatccagtgatgccgctgtcaccgcccctgatgccctagataatatggcgtttaatgtaccggcattaaaactgggtaccactcaaggccctattctgccggagattaaaggcatcgaagtcagtgttaatggcaaccgcagcgtgcgctatgcctctgacaacggtattgaacagacggataccgccagcttcccgtttggtcaatccccgtcgctgggttccggttttaatctggttgccccggaatggtatggctctgaaaacgcaacattaacgattacgcctcaatgggttggcttaccgacaagcagtttttcaacatggtatgacaaatataatccgaaacctgccagtaatggggtgttcaaagtacaaggttacttagtcacatctcaaaagagagacgctctcaataacgctaaatctcagtcattatttggtggaacaggtaccccacaaggacaaagtctgacattgaccttaccggtgatgaattatccccttgcagacagcccatcccccaacgaatggccggcatccgtgcgcatagaactggctgaacaggattttatgcacgcccaatactggcaaaatcccacggataaaaatgtcccctataccccgcaaatcagtgcattgcaggtacagttcaacgctaaagccaaacctgagcaattcaccgtttatcctctgaccccttttggccgggccgaggcaacagcaaaaatgccgacactcacccatgaagccttctatttaggctttacaggcgtatcaccgggacaaactctatccttatattggcaattagcagggattcaagccctcgctttatcctggttttatctcgacaagagcaatagctggaacaaattagatgaattagttgacgaccaaacccataacctgtttgaccggggtatctggcgtaccttattgccccaagatgcggcaaatcaggccgctctgatgccgccgggacgctactggctgaaagctgagataacggctcagaccgatcctcaggattaccccagcattaaaagtccgctatataacgccacgacagcgactttagtaaatgcccaagccattgaacaagctcattttatcaacggattggccgctggcagcattaaacagccaaccagcacattagtcgcaatcagcaacgtcacccaaccttgggcctcctggaacggtcgcccgccagaaaccgagcacgctttcctgacacgtctgcctgcccggttatctcaccgtaatcgggtactgagttggggcaacattgtcaccttattaaaagagcaatttgtcagcctgtttgacgtcaaatatccttctgccaatgaattaaccaaaattccggcaccagaaatacaacgactgattgtgatccctaacagccgttacaaagataacgatgatgtactacgaccaaaattaaaccctgcccggctggcagagatggtcgaatggatcaaacaacttagcagtccctgggcaacgattgaaattaataaccccacctacgttgacgttaatgtggactaccaagtgacctttatctcagggattaaccccgactacggccatcatcagctacaacagcaattacgccgaaaatatatgccgtggggcgaaaatccgactatcggcgtgacaaccggtaaccatattgactactaccaactgttagccaacatccaacaatccccgctggtggaacgtgtcaccaatttaagtataaccattgctaaccggaccacaggtgccataggtgaaagtatcgaagccgccgatgatgaagtgctgattttggtctggccagagaggcaccccttaaaccaaggagttaactcatgagtcatcaggatgccctgtttcccatcgtcaaagatgatattaccttcgatgccttactcactcaggccaaaacagtcatcgagcagcaatccggccaatgctggagcaataccagtgaaaatgatcccggtgtcactttattggaagcctgttgttatggtgcatctgatctggcttaccgtcattcattacctctgaaagatcttctaacccccaaacccgcggaacagatacccggcgacggtattttccctcaggagttcggcccacaacaaacactgacctgtggcccgatcacggcggaggattatcgccgggctttattggatttacatagcagcgacacagttaatgaaacaaacaacggttattttttctttaatgatgtccaactgatccgtgaacctgaagaacaacgctataaatattggtataacaaacaggaacgtaaatatacctttaacgatttgggtgccgacggcaaattaaccttgagaggaaattattggctttatttacttcctggtcaggaaactcaggccgataataagctggctcagcagaagctcaacgatttcctaaaaaataaccgtaacttgggggaatccgtcagcaaaattatctggctgcaacccatcaatttcctcttgcagattgatattgaacttaatgataacgtcatcgatattcctgatatcttcgctcaggtttatatggcggcggaacagatggtgctggaaaagcccgggcgctataccactcaagccatgaaagatctgggctacagtaatgaaaagatattctccggcccttatttacatcacggctggataccgacattacctcaaaccaaaaattacaccggcgctacggtattaaatctcagccatctggttaaccgattattggcgattaacggtattcagagtgtcacccggctagcattagctcatcacgacacaactattacgccattgtcgaacgataattggtcctgggagattgctcagggatattacccgagattatggggtaacgatccactggcattaattacctcaccagatagcccactgactattaccgccaaaggcggcgttaaaattgttgtttctaaacaagatatcgaggaaaagcttattgcagagccgctgatcgatacacagccggaattactggattggggtaaatatcgtaaagttctggattactatccggtgagtaataaattacccgcctgctatggattacaggccaaaaaacctacgccacagcaagtacaactgcaccaatttatgcttccttttgaacagatgttggctaacggctgcgctgaacttgccctcttaccgaaactcctggcttttaaacaacggggggagaccgtatatggtgtgcaatggccttttaaagcgggcacggtcaattacaacgttcatcaacagatcacctctgacttaaccgcaaaactaaactacgattcacaaatctatattaatgatgacattcagaggtccaactatataaaagagctggaaatcttagatcatctattgggttattttggcgctcaacttgccgccagaccacttaccctcgattttcaggattttctggatacccaacgcggttatttagcccaacaaccggaactgacctatcaacgtaataatattcggattgataaaatatcggcactacaaaaacggattgctgcccggttaggtttaggcggggaatgtttcagtgacacgcctgatctggctaatttgccattctatttaattgaacatcgccaattactaccggcaaaacccgatatccaatttaatactaagcaaaagcctgattctctggtggttgaagatgatcaattaagaatcacccaaaaagggacagcaggccgcttattgcaagggcaggtcattaacctgatcatcactgacaatgatagagaatttaccttgcggggtcagatgatcactgaagtgtcaggagagacattctcccttaacacacgcaatagcacgggtttaaagcacaatctggaaagaatactggaggcatttgagcaaaacaaattgttctggcaaaacagcccagtgtggttggaagatatggattatcaactggtttatgccgatgccacatatcaaaatgctaccgaagatcaacgttggatcacctccagcgcccaaagccccttcccggccatgattgaagaaaatgacgaaatcaccctgaaatatatcattacgccatctggaccatcccaaaaaacattagcccgtacagttcaagctgaaccgaaacccgaatatgaactcaaagcacgtgtcattaaatttgatcgtattcaaggcaagatattaattaaacgcaaccaagagtcacgggataattttccttccgagacagaagcatggcgctatcgctggtatttctccagtgaaaaatatgccctggctgatcgtttttcatttgtggttagcgtggtagtgaatcgcctgttaattgagagcaacaaagttgacccttataaactggaagcttgggtaaaaacggagattctctctgaatttcccgcacatatttcgatgattattcactggttatcaccgaaacattttgaagattttgccaatacctataaacgctggcaaaacaataatgcgcctttaggggatgaggcataccatattttagagaccttaaccctgggaagattaccttccgctacagccggtattggcagtatgcgaattgccaccgaacagcaacgtattgaagtcattggtgaatcgggcgatcaatggcatgaagacgtgataaaagataatcagctattatatgttccttatactaaaacggtagtattggtaaatattgacttcaataaagagaataataaagaaacgactgtttcagaacttctgtatcaaccggtagagaataaaggaaaattggtatttttaactgataacagtcaaataggccctgaatatgccgtactgaaatcagataatgtatggacagattaccatatcaaagtgaaaaagaataaaaatggggttattaccgatgaaatattgcatattaaaggaagaaaaaaagttggacttaatttatcatggacagcaatgaatttatatgatcttgatgcagatagtcgctggtcattctattatggatttgtattaggcgataacccagatctgtctggtgcattattccacaccgaagaaccgcttattttatcactcaattacatatctgaccctaatgaccttaaaggagaaatacggacaaaattcagctttaattttacttatgatggcaataacccttaataatataaaataaatatctcactgattaatacctcaaaacatttcaataatctcgctattatttgaatatattttagtataatagcaaacataatataaggtgataaaaatggtaaaaaaatataacctatatagttcagacgctaatctggaaagtacgaacattcaatcaacaggaccttccgtcggtgatttgaaaaaccgttttaaagagggcagtattccattacagaccgattatgccgatttgattaatattgccgatatcggtcgtaaagcctgtggtcaggcaccacaacaaaatgggccaggagcaggattaaaactggctgatgacggtacactgaatttaaaaatgggcacgctttccagcccagacttttctccattaatactcgaaaaggatattttatctgtagatcttggtagcggtctgattaataaacccaatggaatatgtgttggtcaaggtaatggtattgttgtcaataatgataatgtcgcggtcaaggcggctaacggtattaccgttaatggtagcggtgtggcaatcaaacccaataatggcatcaatgttgatactaatggtgtctcggtaaaatcaaaaaattccacgattaaagtcgaatcctcggggatatcggtaggaattggttggggagtaaaaatagggggtgaaggattagatattaaagccagtaatgggattaaagtcgatggtaatggtgtttcagtcaaagccggtttcggtatcacggttaattcagacggtgttaatattgatgccaataaattactctccaaaggaatgattgtgatgttttctggtagcagtgctcctagcggctgggctttttgtgatggtaataacggaaccccagacttaagaagccgttttatcatgtgcggtgaaactgtttctgaaacagggaaaagcagtaataaagccagtggaagtgggagtggaaaaaacgtttccagaaatacaacatcaactgcggtttcggtcaatgttagcgtgctaaacacaacattaacagaatcacaaatacccaagcataaacacattgagagcctgccttattataccactctgggattcgcatatgatcatacgactataggagcaactaacaacaaaatagataactcagttaacggacttatatggaaaaggacatctgggccagactatcatccatacacatcagatataggaggtggacaaggacataatcataatgcatcagcatcatcgccttcacatactcacagtgttgatgtcgttccgccttattatattttagcttttattatgaaactctaacttcaccccacacagaaagacctaaattttctattttttactcattaccaaggatatattgatatgacttcggagccaaatctgttaaatcggattaccattactattgaagctaataatcaacaggtggctaaaaaagtattgcatggctccctgcttaatcagaccaatataaataaattactcaattcatattttgatgaatatcatattcatcagaatatcgctttagagaaattaacgctggaccttggtgaaataagtttccatgattttaattcattattcccggctcgtctcaaagttgctctgaataaagcgctcagccaatatcagacaaataaccatagggaagaaactctactgaataaaccaacatccaataaatttaccgataggacctctttatccagtgaaaatcatttaattaatgcagagaatttcattcatttcttatctcaaaaaggtccgcaattcaatccaatggaggtcataacgaataataaaaatagtgacatcaagattaagccattaatcaatcaattaatgcagatagaaaaccaatcagcattattattagcgaaaggctgtttatctgaacagggtctacaacggcttttagctatcagacaaccagtcttattagtcgccattaaccgtagattatccgcaagaataaacaaaccacaacatcaggaggagcgagtctcctccgggcaactgatacttaatgcactggaatatatacagcggcataatactcaggaaatacctaaacccgatgcgaaaatcatctcacgtattaccattgaactcgataacggtgtacttaacgcggcacctgttattacattactccgccaagctataacccgcaatattccattaaacaatattccattaaacaatatcccattaaatcgttggctaaaacaactctggcaaaccgtttctgtttcacagctttgcaaaaagcatctgcccgctgacgaatatcaatatctattggaatattttacgctaaaccacacggataaaaatatatccgataaaaaaccaaccattactcctgttgatatttctaatattcaggcataccaacacttgccgaaatattttactgcaaacaatgcaggcaagaataaatctgatacagaatcaaccatgaataacgttaatttttcaaatgttcaacaacatctgaccaatcaaaaaatagtatcagcacccgataagacacctattataggcaatcattataacccacatcaaactagcaataagtcacactctggatgggctttattaacggataaaaatacatccgataaaaaatcaaccattactcccattgatattgctaatattcagacataccaacatcaggctaatcagcaagtcatcaccgatgatcaaaaaatagtatcagcaccggataagacaccgattacaggcaatcattataacccacatcaaactatcaataggccatactctggacagactttattatcggaacaatccctgccataccagataaataatgccggcatattaattctgtggccgatgctacccacactatttaaccagcttggtctacttgagaaacagaaattcattcatcgtcaagctcagctcaatgctgttgatttacttgaccatctaatttggggaaccgaggagaaaccagcagaaagaaaattactgaattatgttctgtgtgggctaatagccgataaagatattgaatcaatccctatcgagccagaaaaacaattgatagcagatcaatggctggatgcggtgactggccaacttaccggctggaaaaaattaagccgtaatgatgtccggcaactgtttttacaacgaccgggtgaattattgacagatgagcaagaaatcaaaatcacaatacagcaacagccatttgatgcgctactgattgattggccgtggccattaaatatcgccagacttccctggttggatcgccctttacgcatcgactggcaaaatatttagaaggtttatatggattacctacctacccataaccaccatatagtggcagaatcacattggatttatccccatttggaacgtattgatctgcggttacagcattattattaccaaaagagtgacaaatacgattccttaccggaaagttttttacttaccgaagatgaattagatcagcgcttgaaaaaaccacagggcattccccattggctaactaaaccaaataatattgttattccgccagaaacagaaaaaagcccaactattgatccattatcaattgatctattgtcaatattagttgatcgttttgaactgactgaatttgagcgagatgccttactattaggtttattaccccattttgacagccgctatcatgcgctatttgctgctctgcacggtagcagtagaaaacagtggcctacttttgctttagcaattaacctattcagccaacgccaaagtgatcgacaattactgcaaaacagtttcttaccgcaaacaccattaatcagtcatcaactattacggctcaataatcacgaagaatctatctggctacagacgcaatttttaactcacaacgcggtctggcattttctatcaggccagcaggtcattctaccaccgctaataacctgtgcttattggcattctcctgcctcacatcgttggtatcctcaagccctttatcattcattcgaaaaaatattattgaatcaaaccgacgaaatacgtccattggtgatacttagaggaaaacaggacagcgccagggaattagcggtaagccatattatggcatctcataacataaggactttaactcttgatttagcccgcctgcccgacgaagacaatataacggtaataactaacttactgacggatgccgtgcgggaaacccggttatatgatggctgtttattaattcgcaacttttctttattcacagagaaaaagaaaatattaaataacgaattatccactttactaaatcaacccaaattacgcgtggtttgtctggcagaaccacaagactcattaatctggattaaacatctgccaatggtacaaattgatatgcccgctgctactctggcagacaaaaaaaccatgctggaagccagtttaccggataatatcgttcagaaaataaatatccctcaattatgccaacgtttttcattcaccgcagaaacattaccgctcattcttaaagaagcacatcaataccaaatactccgacaaccagcaggtcaattggaagaaactgatctgcgtaaagcattaagtttccgtgctcaacaaaatttcgataaattagctcagcgaatcacccccaaacgccgctttaatgatttagtcatttcagatgcattaacacaacaattaaaagaaattattgccgccattcattatcgtgaccaaattcttagtgctggctttcaggaaaaaatcggttatggtaccggtattagtgcgctattttatggcgaatccgggaccggcaaaaccatggccgccgaagtgattgccgggcatcttggcgttgatctggttaaagtcgatctctctagcgtggtgaataaatatattggtgagacagaaaaaaatatctcccgtattttcgatctggccgaagcagattccggcgtactatttttcgatgaagccgatgcgctatttggcaagcgtagtgaaaccaaagacgcccaagacagacacgctaatattgaagtttcttacctattacaacgactggaaaattatccgggattagtcattttagccaccaataatcgcagccatttagacagcgcatttaatcgtcgttttacctttattactcgctttacttatcccgacgaaatattacgtaaaaaaatgtggcaaacaatctggcctgaacaattgcaattatctgatgaacttgatcttgaacatctggttaaacgcactgatttaaccggtgctaatatcagaaatattgctttattagcatcaatgttagcgaaaaatgatcattgcgaacaaatcgaaaacaaacatatagatcgagcggttactctcgaattaaacaaaactggccggctaattttttaaaacctaacaagattggagtcaacatgacaacgataattgcttctgacaatgctattattgaaattaaccaagcattaaatactattttatcccagtatttaaatattaatggcaataaaattgatatccgctttgatctacccgaaattaactccattcaaccggaaccgacagtaagcgtatttctttacaatatacatgaagatttacaattacgctctgctgaaccaagacgttataatccagcaacccgttcattattacccggctgggtaaatatcaattgtaactatttaattacttactgggatgcgaataaaccatcgagcgacagctccagtccagacagtcaacctaataatcaagccgcacaagtcatgacacgggttttaaatgccttgataaataatcgtcaattaaccggcattcccggcgcctatacccgggttattccacaacaggaaaatttaaatagtttgggtaacttttggcaagcgcttggcaatcgcccacgcctctctttattatattccattaccgcacccatgaaactccaagatattaaagaagatattacaccaattagccaaatttccgcttctgtggatcagaagccaaacctggataattcacaaatcaatcaagctctggcagataaattgtgtaccgatttaggtggcaccgaagatattcgccttgcgctggctaaagttaatctgatcaccgaaccaacaacagataataattataatcaggaaaatgaaaatgttgttcttgaagtctccggcatgaccctttcaacctatttacctaaaataaaagatattctctcaacctggaaaaatagtcagagtgccataattaagataaacggcataggtattattattgttgaagaaaatgctgataaattaattggaatttagcattatccagcctattgtgataggtaaaacgcactatatcacaatcatttccatacattaaacattcaatttccatacattagatattcaataaaggtgataatatgccaaacaaaaaatacagtgaaaatactcatcaaggaaaaaatcctctaatgaaatcaggggcgaataatgaacatgatctacaagattccccattaggcatcggattggatttaaatagcatgctggtaaatagctctaccagtttaagtcaaatccaggattattcattttggaaagaaaacatttccgaatattacaaatggatggttgtcgttgaatctcatttaaaacaattggactggaccttaaaatcaatggattcgcctgaatctgccggaactaacgtagccaaaaatatgggtgttactgcactgcaatctctattaaataccggaagcagtatagccggcggcgctattggaggagccatagggagcgcgatagcaccgggtgttggcactatagctggcgcgggtattggtgcattagccggaaccggattaaattaccttaatgacaccgctatgagtaaattaagtaagaagcttgaaatcgctcatccttaccctaaaacaagaaacatgatacttgatatcaataattacgataaaaacccgatcattaaagcaatcaaaaaaaacgtcaacaaagacaacttaaaagtcacggcgggcagttcattaacatcgaaacttgtaggaacagtcacctcaccaataaaatttcctgcctataaatttgctgagctggctgtatcacatcatagggcattagaaggattgagtgacgataaagccagacatatattagatttcaccaatagtatccgtgaagttcttaaggaaagccattctgatgccgttgcatttatgcgtaagaattatggcgataatgcaatgggtctttctggattttcttctaaaataaagagagaaaaattaaccttgaatacattagcaaagacaaaaaatgaaatagaaaatagaattaatagcatcaataaacaaacattgaaagtttcttcaagaagtcgaaatgaataattaatctgtattaactcagatttaccaataccacagagttaagctcgttaatcctcttaacgagcttatacctgttatctttcaagttgcctctttgttggctgcactctcttaccccggtcacataatttgctatgcccccagggattcgctcccttgccatcgcgatccatcttgaaatctattgggtatattatcattctgttgccagtaaaaataatcccgccagcaatttttccccctcttttaccatttccaacaataagttacctttaaaattcacctaaaataaacctgataaacaagcgctatacagaaaataatatatacccgtcatctttcaagttgcctctttgttggctgcactctctcaccccggtcacagagttacctatgctcccggggattcacgcccttgctgtcgcgatggatctgagatccatagggtatataactaagatattatactactgactcacaacttgatctttagggttaaatgtaaatacagcatctgttgcctgttttacatttatacctttaggtaatttaatttgaacaataggtaaaaatttacctgtcgcatctttataatcacgttgatctttttgtgcattaactaaacctggattttctgaataaaaaagggcttcaataggtattgtttgtggcttattctcatcccaaggttgaacgactatctcattataatttaaaccattaccatgataaggcattgcaagcaatgtttgataaaaagcatctgctggatttttggccgtcggtctaacatcaaatgcacagattccccctgccgattttcttgcaatcgctttatttaattgatgagcggtgaaaacaccaaaatcttggcatgatttcccatctgaaggtttaggcggtgcaccacagtaatttccctgacgcgcccaagtattggcatcaagaacataggagcataatacaggaactttaaccttatcttcaggggccatctgttcaggaaaaagaataaaaccattaatgctagcaaatgtattgccaaatttagcatcttttcttaaatatgaaaaagaaactccattattttttatagaagatggatttaacttccaaaatttaaatccaggccgagtccctctcatcaaaactccagaacaaagaaaagcaggtgatactcaatcacctgcttttctttgctctggcgttatattacggggcactatacattcaaatgattataaattttggcaacctagcccatcatctataaaaagtggtggtgtctctttttcatatttaaggaaagacgctaagtttaaacgcttagcttatggatataaaaatggatttattattttccctgaacatatcgcacctgaagatagagtcgacttttctgtattgtgtgcatttcctattgatggctatacaaatgagagggcgaatcaaggttgtggtgaaaatattactaaggcgaaagataaaggtaaatcttgccaagaacaaaatgtgacgaattccgatgattggataaaaaattataggaaagtaaactctcaagatttttttcaatgtggatttaatgttactaaagatgtcaataatccggctatagctttctatcaaatgttagaaagtatcaaaaaacttccacgtactcctaatactccaccaaaacagaatgaaatcagaatttcaacctgggaagaaagtgatcctaataaattacctattgaagcccttttttattcagaaaattcaggtttagctgatgcccaaaaagatcagcgtgattataaaaacgcaacaggtaaatttttgcctattgttaaaatgctactaccaagaactttaaatgaggatgcattattcaaatttaatattaaagatcaagttattaatccataaacgattattggattactgtaagctctatttttcatactgagcttactgtaatccaccttcactcttcgtgatgaaacagaactccactttgacatcttcctcatcctaaagagggtgtcgcaaaaggccagcattaaaaataaagccaatccactgatcccaagcaataaaaataaccctattcattatccccgacttgtcatacttaaaattgaacgaccagaaaaatcagcatcaactaacaatctctgctatcaattgatgttgagtctaaaaatccacctccaataattgttttttcatgtaaacttatttaaataaccattgaattaaattttcaaatataaataataacatctataaatcatgttattgcagtagatatatccttcaataaaaactaacgaaaacaaagcaataaacatttttatattttaaatacaaatagtaaacaaaggaaaaatcatcaatttcattgttaaataaaacaacccaacattatatacaaggtgataaagatggagaaaaaatataaccggtccacttcagaatccaatacagagaatatcaatactatggatcgccatgaagttggtaaaacgccctgtcaaactgataagccaaattcagcgctaaaaccgggtgatgactatacacaagcaataaaaattaaccctgacggcggcttaacagcagataaagatggattaggtgtaaaaattaaagtgggtaatggtattaaggtagacagtagcggcatcagtattgatcccaataatgtattgccaaaaggaatgattatgatgttctccggtagagatgcccctacgggctgggctttttgtgatggcaataatggaaccccagatttaagaagtcgttttgtcatgtgtggtgaaactatttctgagacagggaaaagcagtaataaagccagtgggagagggaatggaaaaaacttttccatagatacaacattaactgtggtttcggtaaatgttactgtggaaaatacaatattaacagaatcacaaatacccagtcataaacatattggaggtatgccttattattcttgctttggaaataaatatgatgctgttagtgctacccaaaccgaatgccaaataaatgatataccagatagctcaatatggatgaaaccttcatccggacttaattgctatgccaatacatcaaacacaggaggaggacaaggacataatcacccggctacagcatcgtccccatcacataatcatagtattgatatcattccaccttattatttactggcttttattatgaaactttaattccgttgcaccaaaatatttaaatcatttatcactttctaaccacaaaggatatatagcaatgaatatatctagttatttcttcctaaatgaagaaaacattagatttaataatcaatgtttaaatacatacattggctacccccaacccatcagtaaagattggcccaacctgcttgccgggttccaaagatatattgacgatattattaatttaacccgaattctggataagaaattgacgagaagcctgttccaggagcaaagttttggtgtgcaccaaaaacagctccgaggggggaacaggctatggacaacttagttgaaattttctgtgatgtcgatgatttttgccgttttttcatccctcaatgggaacaattttgtctcgatagcgggcatcgtttacgccgccgacaaggtcatatgtatcccagtgaaatcatgaccattttgatcctttttcatatgtcgcattaccgtgattttaaacatttttatctagaacatatttggaaatatcaccataaggattttccaaccttgcttagctatcctcgttttgtcagtgtggctccttccgttttggtgccattatgcagctatctgactcaattaaaagggaaacccacaggcattgcttttattgattccacccgtttgagtgtctgccataacattcgcatccctcgacataaggtctttgcggggatagcaaagcgcggaaaaaattcaatgggctggttttacggtttcaaattacacctggttgtcaatcatcagggtgaaattctcgcgcttaaagtgactccgggtaatgtggatgatcgggaacctgttcgtgaattatcaaaagaattaacgggttctctttacggtgacaaaggttacctcagccaggaattggcggacgatttagctaaaaccgatgtcactttcatcacgaaaaaacggcgtaacatgaaagcgagtatgcaagctgagtgggataagataatgttaaaaaagcgttttatcattgaaacgattaatgggcaattaaaaactctttctcaaatagagcattcccgccaccgaagtataaaaggctttctgttgtgcgttttaggtggattgattgcttactgccttaaattgaagaagccatcactgaaagttttctactcagaagacgatttttcaatgacggattaagcagaattcgggttaatttaaatggttttttatattttttcaaaggttcactgtatcttaaatttgatatcgcgaaagcagaggtcgttgataggccaaatttcattgtggatggctggcctgggttagaaggaacagaatttgaaaatggaatagatgcagctatagaattgaccaccaacaccgtttgttttttcaaaggaaaatattgtgtagattacaccatcgattcacacacaattaagatgaatactatttcagaccggtggggaatgaccgggaaatatgcagcatttagtagcaatctggatgccattatttcatggccagatatcgatggaaattttatttattttttcaaaggggattcttttattcggttcgacccaaatttgaatgcacttgatgccgggccaatcatcatctccagcgataatgagggttggagaggattagccttcaaaaatattcaagcggcggtatcggtcgatactgatttattaggcagcaaccgagacaatagtggaggcaatagtaaagtctgtaatggaacatgtggtactaatgacacgggtaaatattgtttccagttacctcaaagtattagatttggtttgatagcctacgctaatacaaatatttcgcaaactgtaaaagtatatattgacgatcttctggtagatacattaaccggtaaagggcaaaataatttaatggcgactaaagcctacacatcaggtacaggcaaaatctgtattgagattgaaggggatggcaaaccatgtaagctacgttatttcgataatatatttgatggaaaaccgggaacagctattatcagcgctgaaaatggtaccaatagtcattacaatgatagcgtggtgttcttgaattggcctctgacataaactaaaaatactcggtttcgaataattattgcgccctccgtggcgctttttttcctactcatatgactaccgtaaaataaatagtagtatttggaagaaatacagtaattttgccggacatttattcaagctcactctggctcagaccggtggttttcatcactgtttcacaatcgattccgctgttcagcaatgcatgagcaatttttaacgttgcttcttgacgcccttcttgacgtccttcttgacgtccttcttgacgtgctttatgttccaatctttgtgctattgtcatcagtacctcctcatacctcggggactgttctgccagtcgccgtaagatcctcatctcacacggatcgttgaatgctgattgaggactctcaagacgagttagtggcgtatttgctccagttcgttctggctcagaccggtggttttcatcactgtttcacaatcgattccgctgttcagcaatgcatgagcaatttttaacgttgcttcttgacgtccttcctgacgcccttcctgacgcccttcttgacgcccttcttgacgtccttcctgacgtccttcttgacgtccttcttgacgtgctttatgttccaatctttgtgctattgtcaccagtacctcctcatacctcggggactgttctgccagtcgccgaataaaaccctctggatcggcggtatctcccacctgtaataagtagtttagcacgctttttagctgttcatccgtatagtaatcatacgtcagcagtataaccaactcttgcagcagctctgccatatctcgctgccggatatgcttttgcaccatttccagtagcgcgacccgtttgtgcgtcaagatttcatcatccgggattaccgtcacatctaccagcgggaatttattggaatagatttcctccgccagggccggatcatcgaaacagtcgagccaattggtactccaaggatacggctgtattttaccgtgatagaacaacaccggaatgaccagcggcaatttttcatgtccctgctccagatgccgttgcatggctgaaataccgtagcgcattaatcgaaatgccatcattttgtccggggaactttggtgctcgatcacacaatacacataaccgtcaccctgagccgttttcaatgaatacaaaatgtcggaataatgcgcccgcagattgtcttcaataaacgaccctgattccaaccgcagtgtatccagatcacaaactgcccgtaatgtcgcaggcaaatgtatctccaaaaagtctctggcagtatcaatatgacttaaaaactgtttaaaaacagcgtcatgtggcgttggtgtattttttctcttcatcggtgaatggtagcatactttcttttatattgaaggaatattaagcaagaaaccaagaggactgagatgtcttgaattttctttgacaaaaactttgatcgtatctcagatactttaatttccttcttaagcgaagttcaggttagttacctttcctgcaaatttccgctatttacctgctccaatgatttaagtaaatgttttgcattagcggatgaacgtagtaaataagcagtttcttcaaggcttgcatattctgcacttgaaataataacgcaatcaccgccgttttgtctggtaatcaatattggtgtacaatcctgaacaacttgatccattatcgaagcaagatttccctttgcaacgctatatattgtcttccgcataatatgccttttccaccgtagtataaatatcgtacaaagattgtatgacaaaatagtataatatcaagctaaacatctatatgtgctatccgtggcccaatctctttattcgcacgatccctatccgcccatatgtaaaagttgatagctttatctgattgcaaatcacctttgatttgcactatgttacttgaccaattctagttaaaataataaaataatggtcaagaaataggaggttttatgaacaccgcaaccaaacaacgtaatttgaatgagctacaggtgttactgcaaaaacgctttgacataatattcggctcattgatgcctgagtttgctgaaaaggcgaaggccagcaatgctcttgttcttccggatagcgaactttttgggctgctgtactcaaccgtacttgaaaagagtgccaggactcccgatcgcgaactccgcaaactaaagcgtcgcgctgagaacctgtccaatttttataaggaaattgagcgcatgggtggcgtaattaaagcagtagatgttgctgatattctcggtatcacgcgtcaggccgttaatttgcgagtgaagggaaataagctgctcgctttcaagaagaatagtgatcatgtcttcccgctctttcaattcaaagaggggggactgttacctcactttgaagacgtcatgaaaacaatgagcaatgatatcgggcctatttccagaatatcgtttttgactacccccttgagcgacaagaacggtaaagggaaaacccctatcgagatcatgaaagaagatagcagcattgatgatgtttcaaaaatgcttcgtgcagcgaaacagatgggcgaacagatcgccagttaaaagcgtgtcctttcgaaaaggacacgcctagtacaaacttaaagcgggacaaccttgaatcgaagcacgtcttcgagcagttcttcagccgtgatgctggagtatttccagttcgatggcatgtattctgaatcgtggtattccgcgagattcttcattcctacatcttcaaacctttcttcatccgattcccagactgcatagcagaaatcagtggaaggaaaatgcctcgataagtaacaaacaccgtcaaacttatctctggcgagcttgtagaggcacgcaattactctctgtgtcaccgtgtagtcatctccgactgagacgtctaacgtaatgtgcagcattcccagaagtttccccacatcgacaaaaacgagtggccggagtgggcgaatcagacacattcgtgagttttcaataacagactcctcaacgaatttccgcccatctttatgtatcaggtgcccaaaactttcagcaagcgctgaaacggccttgtctgccatgtagcaaacaccaaaagtatcatcaggagcgttatatcgaccgtcaccagtggagaaatttatagccgatggccattctttcctctgccagcgttttaagtccccattaccaggtgaatgcgtcggtaatgaatcatcttcaaagattgccgtaatttcttgatctaaatttggatagtcaaactttgaaagagaagtctcctttgtttgcattgtgaggtacccccataaataagtttcgccataggcttttccttaatgtttttttgaaatggtgccgtgtgcttgcccactgacaccgctataccgtgattggctcgataattatacgacaattaaggtggttttaaattgattgattttttggggtttattagaccactacatttctcgtattaataataccgaatctaataagcaaaaaataacggtacaacctcaagctaaatatccattgcgccatccgtggcgcactctctttattttccctacttacaattaccgtaaagcatccatttaattaagcggtagcatctgaaatcaattgggttgccggtacatcctgtccaaatcctcgcaaccctaccacatgcacatgttcgtggtttttaaataccttacgcaccagtttataggtggtccctttttcagggctgatattttccggggcggcgataattaactgcatttgcagacgctcacataattcaaacaaagtagcgatagatttagcatccaaacgcgccgcttcatcaaggaataacaatcgacaaggggaaatatctttaccacgcaaacggcgggattcttcttcccaactctgcaccaccatcaccaaaatcgacatgccggtaccgatcgcttcacctgtcgatagcgcaccactctccgcttttaaccagccatccgatccacggttaacttcaacgtccagttccaagtagttacggtaatccaacaactcttcaccaatggtttgcggcaagcgctgtcccatatccacttgcggattcagacgctgataaagttttgccattgcttccgagaaggttaatcgctggctgttaaagagatcctgatgctgttcttgctgttcagaaagtacatccagcaatagtgcgtggctttcacgcacattgacattcaacctcacaccacgaacctgtccgaaggaaacagcttgcagcccttggtttagcatgcggatacggttctgctcgcgctgaatggttttgcggataatattcgccacactcttcgaactgatagccaatttctgctcgcgagcggtcagctcttccgtcagacgggccagttcaatttccatctgttcaatggcatcaaccggatcgtcagtgcggataatatcctgacgaatacgttcacgtagatgctgataaaccgcaatgaagaattgaatcttacgttcagggcgttttggatcttcggataaacgcagcgcatcgcgtagatgctcgttatcggacaccgccagacgcaacgcacccagtgccttatccgacatggaacgtaacgcgccaccctccatatacgccagttcacggcgatgcagacgacgctcaacgccattgtctttcaccatgcgcatcaccgcacaccaacccgctttggcagaaaccacctgttcacggatttgatagtaatcacgttccagcttacgcagttttttctgcaagctatccatttccgcttcgcaaaaggcgatctgtttctcaagttggttgactctggaacggttagcgctaagtgcctcatgcagttgatcacgacgctcgcgggcgcgcatttctgcattggcatccgcccgcacaccaatctctttcatctcttggtgcaactctttcagcatatcctgtttggtttcgtaagagctttttagcgatgccagcacttggttaaattgggaatactgcgcttgctgttgacgcaattgttcgcgggcgcgactgcggtccgattctgcatgttccagacgctgacgcagtttatcattcagatccgcattttcactgagcataccggcagaatcgctgtagctaaaatgcgcacggcgctgcaccacttccaccagcgcaaaagcctgttgtttagcctgatgctgactctgtttggctgtttcatagtcctgttgcaactgttcatgctgctgtggatcgctttgcagaaccgcaaccatcggctccaatttcgccagtgccgagccatgttgttgcaggaaacgagctgcttcctgcgcttcatccagctcttcacgtatttcttctacgcgatcgattaaggtttcatccagcaatagcgtaacttgagggatcaggcgatttaatgtcgtcaggctctctttagcctgagtatattgctgacgctgttgttgggtctgctcttcaaaccgggatagttcacgttccagttccgtgtgacgctgccttagttcacggatttccgcttccggatcggtatcaaatgccacagagaggtgtttacccacaaactggctgaatgcctgatgcgcacgctgaattttctgcacatcaaaagatagcgtggcataacgctctgccaaggtatctcgttccagattcaaggcttccagacggttttctctggcggcacgaccaaacaatggcaattcaggataacgggaataacgccattgacgatcagacgatttgaccaataccgcgtttgcctgctcttcggcattaaatacgctgtcatcaaaggattgtggatcaccttctattaagtaaagatcttccgggcaatcttccagcgtttcaagatgtgaacgtactaaggaaagatcgggcaccacaatgccatgtcgagctggcccatacaaggcagagaagtacggtgcatcatcaatggtgatgtcgtcataaatttctgacagcaaaactccaccgaaacgttccgccagcgcaatcatccggctatcttccgctccgctcggttgactgaggcgctcgatctgcttttccaactcacgtttttgcgccgcaacttcatctcgctctaccgttgcctcacgttcacgttcaagcaactgctgcatatattccgtcacgtcattactgctcgccagcgcttcaccattctgttcacacagttggctcagggtatcctgcgcagccagccagaccggggcacgggcagtcagtgactgaattttctgtttcagttgttcaagcgcctgacgcatctccatacggcgttcaccgctttcattaacgcttaagcttagtgcttcctgccgtgcttcaagttcactctgtaacccttccagatcttcggcctgatattgctgcccctgacgtttacaaaattcgtttaataaaaactctgcattttgttggttggtcaggcgttgctccaattcagccaatcgcatccgcaatggttgcacccgatccgccagatgttgctgtgacggccagtcacgcagcaattcacgagcactctgccacgcttcactgcggctgatttcacccaccatgtttttaaccagttgatatgcccgctcaaactggctatgagccgcatctgcaacacttaatttctgttccaatgtcagcagggattctgtcgcctgttgctctttagcctgaaaagtttccaaccatgcttctgcattatcagcggcaagatccggtagccgacaaagctcacgagcacgttccagcgcttgtaacgcctgttgatactgaatagcgcgggtttgctgaacatccagtgcttgctggtaatctgccaactggcttttcagctcatcgacttcctgttctgccgcttccgctctggcttcatattcagcttgaagttccgctgcttcttcaacaacctcagtctgctcttccagacggtaggagagttcttccagatctccctgataacggtcaattttttcctgctggcgcatggctgtctgcaccagattcaggtgatcactggcggcctgatgatcagcttctaaatcaacagaagctccactctgttcctccagttcccgcgccatttcgacatgacgataccgttcggttgccagttgcctatggctaccaaatagctctccacgcaatgccagtgcttgatccaaataagtacgccgctcattggcgtggcgcatatagtcagcagaaacgtaagcagttgcttcggtgatcaagtgtttgaacagatcgcgatcagattgagttacccggatagcttccagcgttatacggttttcacgcagtgccgcttccatatcctgaaatgccttgcgaacaccactgttttccggcaacaggtaatcacgcagggaacgggtaatggcgctggaaataccgccgtacagggaagcttcgatcagacgatagaatttactacggtcactggctgaacgcaagcgtttgggtatcacccccaaatcaaacatcagcgcatgataatcggtaatagagttaaattgtttgaactgcacgccttccatttcatcaaggcgatctttcagttcattcagtggcaatacacgtgcctgtctttcacccacattttcagttaatagctgcgtaggttgcatagcagttggcaagccttggatcataaagggtttgatgtcaaccttacggtcacgtcccgccacctgttgcaatctcaccccgaccaccacccgctgatggcgggagttaatcacatccaaggttgagtaacagacccccgcccgcaatttgccgtgcaaacctttatcacgagaaccggaagtggcaccggcttcggtggtgttacggaaatgcaacaaggttaaatcagggatcagcgcggtgacaaaagccgccatcgtggtagatttacccgcgccattaccgcctgataaggttgtgactaattcatcaagatcaaatgttctggcaaaaaaaccattccagttaaccagcgtcagtgaacgaaatttaccgcgttcaatcatggttgttcatctcccgtaccttctgctgagttatccgatgtttcatcattttcactatcatcaagcgacaagccgccttcaatcggcattgcctcaccgtcacggatcatcctcagttgtacttcacgaggatcgtcgccactgcgcacatccgcaccaaaacggaataccgcctcagtaatggtaaatttgttgttgtcatttggcaggatatagaccatccccagacgacgcagacggttcagtgtcgtgcgcactttttcctgcaatttctgtttatccaaatcggaaccggaagagcgctggttgacaaacttcatcaacttgccctcatcggccagtgagatcagctcttcgtacagctcttgagcagtaaaaatcccctgattagccagccgttccgggctgagatagagataacagagaatttttcctaccatcatatccagctctgataataccgagcgcgggatcaatgtggtcgaacggggacgcagatagaagaaaccttctggcgcacggatcaactccacattatagcgggcgtaaaattcctccaattgctcctgaaaatccatcagataagcatgattatcaagatcatctatcccgatatgacgacccgcacgaagttggctatccagttccgggaaaagtgaattggctaacgcctgtgccagtttaactggcataaattgttcaatatgtgtcgatgacatgtgcctgtaccttggctccgtaatcattaatcgctaaccattccgctggcaacccagagaaatccgcttctgccacacccaaccgcacagcctgatccaccaaaatacgcgccacatcaaagtgacgagagagcggatgctgagcaaggtaatcccttaacactgcacctaaatccaatgggcgctgttcttgccgatatatcaacagcgctttttcaatcatttctgccagttgttcgtttatttcactgaattcttcatattccagtgctaatggcagttcacccgtcacctcttcattacgtaacgttaattcttcgtcccgcatatcgagcaaacgttcggcgttagcaatggtaagggtccacgggttatcaaaatagtgttgaactgattgacgtaaacgctgagagaaaatacggtttttatccatatcaatcgccgtacggataaatttgtgaacgtgacgatcatagccaatccataaatcaatcgcctgctgaccccaactgataatacggtccagtttgctttgcagatcaaataccagtttatcaaccagttctgatccaccactgtccatattggcttcctgaatgcgcagcaaattagcctgtaatttatctccagccgcttccagtgtgtcctggagttcccgcaacgtacccgatgtttcggataacagttgctcacagttggcaatcgcggcttgccaatcttgattcagcaacgccgcaatatcttccttaaccgagctttgctgctcgtccattacgcgctgagacatgtcgatgctgtcgaaaatttctgcaacagaatatttcagcggcgcaaaaacattacggtgccaatgaaattcatctcccccttcttctgccgcttctgctgcccggtgcaattcactcgccaccaccgaaagttgcatcgaaagacgtaaggtagaaaattcccgctgacgaatgtaatagtcactgatacccatcccaagcggggttaagcgataaattgcattgttatcggccaattcactggtgaaacggttaagaagtttctgacgcaccatatcattgatggcattgttggcccgcaccgcgaccgattctgtggtctgctcaaaccctttgcaaacttcacgaaaggcatcaaccagctcgctttcgctcatttcgccatccaaacgctcgctgttcaacaccgcaattgccatcagaaaagccagtctttctacaggcaaggagatggaaaaatcgtttttcctggcccaagacaccagttccgggacagtctgggaatattcactcataatttgtcctttaaactgttaaagcgggcttgcgtgccatgacatgaatgtagcgccccaagctgatataaggctcctgtcggcaataacgctgttccaattccagcaacgccggaaagttttcgttctgtaattggcgattttgcaaataatcgtgaaaaacacgcacgccagttttgccggtaatcgtcatatttaattcatcaagccattgatatacctgttcaggtgccaacggattctgaggcgataatgaacgttttctgcggcgttgtatattgggcgtcgccaaatgaaaattacctaaaatagcattgcgcattactaagccattggcattgtaaaacattaaagatagagcgccacccggattaatgatattcattagcacttctattgcatatttctgatcggtaatccattccagtactgcatgaaataataccaaatctaccggctgctctatatattggctaatttcttgtaccggactttgtataaattgcatattttggctgacccctttctcttctgcggccagccttgctcgctggatcatctcttctgataaatcacacaatatcacttgatgacccaattcagctaattggcatgccatatttccctctccaccacccgcatctaaaatacgcagtggacgttgaggtaattgagccagtaattcgctaatatcctgccagacaacggcttgcctgattttacctttggttgtgccgtaaatattacgagagaatttgtctgcaatatcatcgaaattgcgatcccgcatgaaaaactgcctcactaatggaatagatctgatttatctgttgagatttcattatactgaatgctattttggcacagcattcgttgatatacccgtcatctttcaagttgcctctttgttggctgcacttactcaccccagtcacatagttcgctatgctcccggggattcgctcccttgccgccgcgatccatcttgaaatccatagggtatataaccacttttgacgacaaactgtgaaccacatggctataattcaaccaaattaaggcaaatagatgcaatttttatttaaaaagtacctcggtgcaatggtgatgcctctgccattaatattgctaatttcacttgctgctttattactactgtggtttacccgctggcaaaaaacaggaaaaacaattctaacattcagttggctcacgctacttctgctaagtttacaacctgttgccgataagctgctgttaccggtggaatcggtttatgctaacagcgaccaatctgataccagtcatatcaatccaccggttgattatatcgttgttcttggcggcggcttcacttataacccaaattgggcacccagttcaaacttacttaacaacagtttgccacgagtgacagaaggtattcgtttatatcgcctgaaccccggctctaaaatggtctttaccggtggtaaaggggcaaatgttaaaagcagtgctgaagtcgccgctatcgtagcccaatcgctcggcgtgcccgcagaagatacaattgcactgacaaagccaatggatactgagcaagaagccaatgaggttgagaaactgattggtaaccaaccctttattttagtgacttccgccaatcatatgcagcgagcaatcactttctttcaacagcatgggttgaaccccatccccggcccggctaaccaattagcgatcacttcaccattacatccttgggaaaaatatctaccctcagcttactatctgtctcattcagatcgggtatggtatgaaactttaggcaccctctggcaacgcattaagccatcaaaagatccagaacagccacaaaaatcagaacattctcagccgctaaataatcctcaagtgacttcctgaaacaaagcagcaagatagatggaaaaacgaaagcgcaatggaaataaacagcaataaataaatgatgcgctttcgttaatctaaaatatacccgtcatctttcaagttgcctctttgttggctgcactttctcaccccggtcacatcgttatctatgctcccggggattcgctcccttgccgtcgcgatccatcttgaaatccatagggtataagttcaaacaatcaatcagatttcagtaaacacttttctaattgctgccaaatcttccggcgtatcaacgcctactcccggtgcctttaatgcaatccccacatgaattttttcgccgtaccaaagtacccgcagttgttccagcatttcaatttgctccaacgggctcggctcccattgcacgtagcgacggataaaacccgcgcgataggcataaataccaatatgacgcagaaaattatcaccaatcgtttcccgtgattgaataaaacggccacgctcccaaggaatagttgccctggaaaaatagagtgcataaccctgtttatccataacgactttcacagcattagggttaaaagcttcctctgcatcatgaatctgcacggccaacgttgccattcccgctttacaacctgccaaattctctgcaacctgtttaataatctcttcgggaatcagtggttcatcaccctgaacattaacgataatttcatcatcggaaaattgatatttgttgataacctcagctaatcgttcagtaccagaatggtgattttcgttggtcagacaagcctctccaccggcagccacaacggcatcaacaacgtcgtgattatctgttgccacaatgacacgtccagcacctgaacgtttcgcccgctccataacacgaacaatcattggtttgccgtgaatatcggctaaaggtttaccgggtaaacgggttgaagcaaagcgagcaggaataataacagtgaacatgccttatttttcctcatccagaggtaattcgcgggcttcgtgctctaacaggacgggaataccatcacgtacaggaaacgcaagtcgatccaacttacaaatgagttcaaaattctctttatcgtaactgagttttccgttacatacaggacaggcaataatttcgagtaaacggtgatccatacatcctccaattatggagctttaatttaatgcagctcagaataacataagcttggtatcatcgttaactcttgttatttgatctttcgatccttttcccaatattatccactgaaaaatcaggtaagttggtgaaagtccaaaactatctcggtaggcgtaattgacacaatccctaattgccaataaatcatcaatatagataacaaacaaaaaccggagagtaaacgctgttgtcaaaaatgactcacttcgctaccctccgaattttaccaaaagtgcgttcaaaaaaacgattacctctgtttgcacatggttcaatgcttcctctttaccatttaaagaatggcaataaaatagcttgattttgatagggttttagaatgctatcacatctgccgcggttaaatcataacctttgcgaataattgaaaattccacatcctgcccttctgtgagtgacttgttttttgtattcgcaatcgcttttctattgacgaatatgtcttgtcccccatcctgtggagaaataaaaccatatcctttacgctcatcaaaccatttcactctacccatctttaattgtaatgtcataataactcccccatttgtccatctcacaataatttaatttattgtttttgatgtttttttaccctttattcaattttcgaatagaacctcatctcagtttcaataccttgaccttgaaatacatttcattcgagtagtatacccgtcatctttcaagttacctctttgttggctgcactcactcaccccagtcacatcgttatctatgctcccggggattcgctcccttgccgccgcgatgcatcttgaaatccatagggtatatatcgtttaagtaacagatacgagcggatatcctaccagaatcgtacatgtttgactcaagaatacacaatggttgtttatccaaaatggatagttttaatatcagttagcaatggcgaaaaatcaaataaatctgaaaaattactgaaattgtacgctttggcaaggagcagaaaggcaatctcccggttgactatcatcggcttactatcggctcacagaggccattttgattaaaacataatatacccgtcatctttcaagttgcctctttgttggctgccgtcgcgatgcatcttgaaatccatagggtatgtttacttactattgttattcgtctccaataacgaacaaatcttgttcagcattatctctcccttttcttggggtaaccgagcatctaccggtaaataccaccaatttggctgagcaaaattaaaacacttaaccgcatctttttctgtcatcagtaaattctggttggtgtcagccagatgacacaattgatcttctgtgtacagttgatggtcggcaaatgcatactccttttttaggtcagcacctaactgttgcaaggtggcaaagaaccgcggtggatgcccaattccagccatcgcaacagcgtgaggtatcagattcactgcacgtttttcaccgctcaccatattcacagctaactcgccagctaatgtcatggatagttcgcctggctgaggagtaccgccgttagtgataatggtattaaccctgttcaaccgcccagatagttcacgcattggacctgctggaagccaccaaccattaccaaaacggcgcacgccatcaataaccgcaatttcaaaatcccgctgcaaagcatagtgctgtaagccatcatcagtcacgatgatatccagtgacgtgtttgccagtaatgctttcactgctgcaacccgttttggcgcaacagccactggtgcgccggtacgacgatgaattaataccggttcatcaccggcttgagccgtagtgacattttcagtcaccaacagaggataactttccgctttacctccatagccgcgggaaacaacaccaacccgataaccttttttctgcaactgctccaccagccaaataaccaccggcgttttaccattaccgccagcagtgagattacccaccaccacaacaggtacaggcgctttccagggtagcctcaaccctgttttataactcaaccaccgtaagccacttatcagcccgtaaagggctgaaaaaggtaataacagcaaataaagccatgagcggcctgaccatatgcgctcaatcattgaccaaattgcatccgatgtagttgtgagtaaacaccatttcgctccagcagagagagatggtcaccccgttcaacaatatgcccatcttcaaccaccagaatttcatccgcgttttcaatggttgatagacgatgtgcaataaccagcgaggttctgtttttctgcaattcatccagtgcagcctgaattgcccgttcagattccgtgtccagcgccgaagttgcctcatcaagaatcagaaccggagaatcacgcaacaaggcacgcgcgatagcaatacgctggcgttgaccgccagaaagcagcacaccattctcaccgatcatcgtatccaagccgttatctaacttcctgatgaagtccattgcataagccatctcagcggctttctcaatctcttcacggctgtatcggttttcactggcataagcaatattattcgctaccgtgtcattaaatagatgcacattctgcgataccagtgcaacctgcccacgcaaggaagagagcttatattcccgcaagtcatgcccatccagaaaaatattaccttcgttgacatcataaaaacgggtcagcaaattcgctattgtggatttacccgagccagaacgccctactaaagcaacaatttttcccgccgggatatacatggaaatattttgcaacgccggtaattccttggttggatagcagaaagtcacattacggaactcaatatcaccgttcgcttttttaagctccagcttaccgtcatctttctcctgttccatatccagaatcgaaaacagagtctgacaggcggccatgcctcgctggaattgcgcgttaacattagtcaacgatttcaatggacgcatcacgcaatcattgatgaaaatacgaccgtaattttacccgctgtcaatgtttccataatatccgggaaacttgcggcatacaggacaaaggccaaagcaaacgaggcaataagctgaatgatgggatcagaaattgatgaagcagacaccattttcatgccttgctgacgcatatggttactgactttattaaagcgctcagtttctacgttctgcccaccgaaaatgagcacttctttatgccctttcaacatctgctcagcactggctgtgacttgccccatgctattctgcatatttttactaatactacgaaatcgcttcgataccacacgaatcaccaatgacacgatcggcgcaatcacaatcaggatcagagataattgccagctatagtaaaacatcaaaacaaacaggccgataatggatgccccttccctgaccacggtaatcagtgcactggaagaggaggaggccacttgttcagaatcataagtgatacgggaaagcagcgtccctgtagattgttgatcaaaaaatgacaccggcatccccatcatatggctgaacagacgacgacgcatctgcattaccactttaccggagacccaagagatacaataacttgatacaaacccggatagccctcgcataatcattaaagcaatcacaatcagtggcatccatttcagtacatcactgcttgctttgccgaaaccttcatcaagtaaaggcttaagcaacgaaagcattaacgtatcaccggcagcattaaggatcagtgcaaccgcagcaactatcagcccaatcctgaacggagagacaattggccatagtcggcaaaacgtctgccaggtagaaaggtctttatcattcattattgagttaccaacacaaaaagaaatagcgggttattctactcatgatcactacgaataccaaaccactgatgataccaacgtgacataatttgttgcctatagctcatcatttcaacatgatcgccataaaaataacccgttatctgcccggataccgcggtactacgccattctgccccaattttacgatagcgtcgctgcactttaaccgaaggaagtcgccacgggctataacgtgcaacagaggccagtgcatattgtggtgagacggtatgaataaaagcggctgtagatgacgtgttactaccatgatgtggaacctgcaatacggtcgatcttaaattctctttttctattcccaatagcttatattccccttgcttttccagatctccggtcaaaagcaagctatgtttaccatcttctacccgaatgacacaagattcgtcattacctgcgcgtaatgatcttaccggcggccataatacacggaagctcaacccctgccagagccactgttcaccgcgtatacatggaagatgttgctgattgattaaagaacttctcaccgcaatacctggatatttttgttgtaagaatgctaacccaccggtatggtcaagatgatcatgactgataataatttgctctggcgttaatcgatgccaacgcaaataagggattatcaccctttcagccatactgccagtctcccaacgattagcggtatcaaaaatcagcgctttgccatctttttcaatgataaccgcaagcccgtgcccaacatccagcatagaaaatcgccacaaatagtcttcgttgcgcctcagatagcagagcattacccctaaaaaaatagtaatcagtaatttatatgattgccaccaagcgaatcgccaaataatgacaacaaaccaaccaataaacgttattaatgggggaaaacggccagtttcactccatgactgttgcaaaactggcaaagggattaaagagagggttacagagtaatcaactaattgccataataaagcgtgaataaaagaacaaaagttgctgattaatgccagcataatcaacggcacagtaataaaagagatgattggcacggcccagaagttagcaaataaagcggcaaaattgacaccatgaaataataatagctggagaggaataagcatcagcatcatacccatttgcatatataaccctcgcagccataaccatttccaaccataacgaaatggctcaattaacggtgcccaacagaaccagaacattagcgccatcacagcaaagaaagagagccagaagctgtcagaaagcaccgtcaggggatcaaataagagaatcattgcggctgtccacaatgcccactgccaagggaaacagagaatatttctataacgtaaatataaccagatcgttaaacccagtaatgcacgaatagccggaataccccaacccgatagccagacgtaatttattgccactatccaaccggcaatcagtgggaatctgtgccctatccagtgcacgggaaagaagagttgtaataatcttgccatccaccaaccaaacatactggcaaccgtaatatgcaaccctgaaatagccataaggtgagccgtacctgtttgttgtaataataaattatcctccttacttaaccactgacgttctccgaatgctaatgccatcgcaatgccactatgcttcaattcacgaatatccggtgcaatatgactgaccaatcgctgacgtaaattacatttcccatcaattaattcagcgtgaatgacttttcctgttaaaggtcggcggatagctaatgccctacgctggctatcatatccaccttgatttagctgactatgaactggccgtaatttcattttcagccgccattcttgaccagcacacagagattcaggcgaaatatcccaataagcggaaacatacagtggcggaaaaataactttgttttcattctcaataatacgcaggataactctgccattctcttcattatctaatgataaactttcaataataacccgtgataaatgcgctttttcactaaaatagattatctgttcgagcagatgatttccttgccagcacccaataagaaatgccagtaacgaaattgaaaccatccgacaaagacaaaatggcaagaataagtagaatagagccagtaatagcaatgccatcatctgccatttctgtggtaactcaggcagaaaaaacaagggtacaataccgacaataatagctattgcagcctgattcacgctaataattggtataggttgtttccaatttattgttatcttatttatcacaactgaaaaccacatccttattcatccttacccttttatttttccagcagagtattgcttattttttacaaagcagccagaagcacaagaaaaatcatcaaacaccttcgcaaattaatttcaggctaataatcatttcacaaatatatgcgaacagcttcgcaaatacagaaatttccacctgctaattacccaacaaatgttatattggttgaaaatgtaacattgcgatactgatatcaaataaaatatctcgtaaggttttgtccgtatcttcattacagacataaatataccctatggatttcaagatggatcgcgacggcaagggagcgaatccccgggagcatagataacgatgtaaccggggtgagtgagtgcagccaacaaagaggcaacttgaaagataacgggtataaacattctaagagcctatctcaataggcgtaattgttgcaggccattcttatcaatgaacagtgaacacggacagcgcggaaaaaccggagcgtacacgtagtacgtgaggattttgagcactgcccaggttcgctctttatggcaaagaagggcaaataaaatagccctattgggataggcagtaagtcattatgaacttacgagaagttacattatccacttattattataattaaatattaaattcatttttgaaattattaaccatgcctatgaattaatagaacaatcaatctaaccatatgtaaaaaaataattattatcagacattacctcagttgttgagcactaaattagtgaaactacttaaatgactgtccactttttgttttgtgattaagatcgcattgattaaatttaaataatattaaattaatatttccattctatttttatatggaaagtaatcaaaaaatcatgttaaatacaataaggtggtttttatgaaaaacaaaataattgtatctgactctctgcaagaacatcatcttactaaattatttaatgatgaagtgttagcaatccatataaagaaatatgttgatatctctcttgcagacaagctctctgattttttcctctctcacgaaaatctagaatgtcatcctcatgatttgaaaaaaggagatgaagttgttttagttgattatggtgttgatagaattggcccgtcttacaacacaacttttggcaaatccaaagatagcgatagctataaaaaatattttgaaaatgcgttacctgccatcagaaacgtcagaaatttctgtgctcccatgttagcccctttcgataaatttcgtttagaactggatgaagtatggtctgccggggctagcattgccaactttgaaggtaaaaagatgcatgcggggattgccagagtgatgaacagaccagaacgttctttcatggttgaaaaacaaccccatttcgatggtcttcaacaacaatctgtcaatttgttggggcaattctcagtgaatatctatataaaaatgcctgcaactggaggagagctggaactgtgggatgttcctgaaatccctatcaccgagttaattgaagataatgcagaaaatgattggcgaggcacgcttccgccatctgtcctcattaaaccagagcaaggagatttaattataataaacaccaggaaaccccatgctattcgtagttttcccgaggggggcagaatatcattacaaagcttcattggattatcactaaataaacatctcatgttatggaattaattatatggttgatgtaatcagtacattaggaacattttttcttttaggattgggagctgcggctcccgttggccctataaatatagaaattatgcgtagacacttgaatatcagttgtcttcacgcagtcgtttttggtttaggtgcttgttttgccgatataatttatttattacttttaggttttggtatattgcaatttttttccaatactatttttatgcctattttggggtttttaggcgcattaatggtcatttggtttggtattaccagcttcataaataagaaaaatgaggaaaatatcaatatcatatccaaaccctatcataggcaattttttgatggtgtattgttgacattattaaatccatacaatgttattttttggctgtctgtcagcgcacaactcaacaatattgcatcaggtaaatatagtttagctattggtgcagcagggacaattattggcgttattgtttgggttgcctttattaatactgtgatattcttctccaggaaaatgctcagtcaccgtgttatcaaatttattaattacaccagcggcgtcgttcttattatgcttggaatctatttcttttcatattcaataacactatttaatctgaaattttcttaagtcaggaaatgctatgcctgaggatccaataacgtttttaatcaaacgaaatttcatggagatccttaggcataattaaaataacttctctgttttcattacttattgttaattaaacgagaaagactatataccctatggatttcaagatggatcgcgacggcaagggagtgaatccccgggagcatagataacgatgtgaccggggtgaaagagtgcagccaacaaagaggcaacttgaaagataacgggtacatcaagctgtgggacatcttatccgtactaaacagaggataccggagcagtaacgattctcgacacgcgcattaaattcaaaactacggcaaagatattctcaattctctgcccccgtttcgtcgtgttatctgataagacatttacgttattaaaaaacatgatcaaacaaacctagttgaagttgctgtgactttggtatatattttatgcaagattttttaaaattaattcccttgtaggaagcacttcaagatgaatgcacctgatattaagaaagcacaacatgttgcatacgctcaacgtgtaaaagagcagaagagtagtcatgcagctccacagcctgttatacaaagacctgctttaagtgtgccatcaggtagtttcgttgctggtatggctccaagcttctgattcttccccctataccgcacatgatataatgagccagtgtttataatatttggttctttttttatgactgttgaacacataccgccttctgaacaaatttatttactcaatcaagagctagtccaaaacgctgatagtttagcagggccagcaatcactgttggtggtcaagctgtgcgctactgggtaaatacataccttcataaatactcgaaagataatttacctaatgaagttttcataacttctgttgatgttgattatgtaacaaaacggaacaatgttgaaaacatcgccagagcattcaacgttgaacctcactataacaatccacttgatttcccatctattgcaatatgccttctgaccgataaggacacaaagacaattaaagagcatgaaggccggttgttctctaaccctgataacaatgatgaatgtaaccttgttgatatcattgaccggccagcaggttttgaacacgacgatttatctggcgacaaactatacttgaatacagaacgttttatgattaatgcagcgccaggctctcatgagctcgttcgtattttgaatcctatcgcttgtattcgatctcgcctcgccaacattgtgaataaagtcaaagacgatattgaggtcgagaaagagcgcatcagaagcctgatgatccctacttattactttctgttagaaaaacttgagcatgaagattttcgaacagccagaaaatatgttgaagactttggttatctgctacaagaacgatcacggcgtcattgtcttgtaaaatatgggattgaactccataaagttcttgaatcacttcaagttaatctctctgaacacagggatgattacgagttgccggatatgtttcttgatgaagagttaaggcgaatggctgatcatcataagaatcaatatattagactaagagctcaattacagttagaccaataactttataagaacgaacgccttattgggcgtttcagaccgctatttttaaagcccggtttatctcttctggctcgccattcttttatacccgttatccttcaagttgcctctttgctggctgcactctctcaccccggtcacatagttcgctatgctcccggggattcgctcccttgccgccgcgatgcatcttgaaatccatagggtatataactttaagaacaccttctgggttatcttcaatgccttcctcaggataaaatattaaatcaccaccagaggcggtattctgatattttatccaatgtgccagccaacttacgccccatgtcaaacatatctgttacaccaccgacaatgatgtaagtgccgggatgtttaccacaagtaaccttatctccttcacgagccgttgctcgcccatcaaatgtcatggtgtggtcaccagtaataatctggccgccacacgttgttttatcaccaaccagcaggaaataccctattgccatctattcacttctccattgatttatagcatgaagagtggttctaactgaaatcatcatgttttcaccacttatggattaataaatattcaatgatgcaatggatttcacctaaaaatatataggaatattccgaaatttatcgaaattaagtggcttgatgccggtattaccttatatttttaacaacttttatacatttatttatcaaaagcgaatatcacgaataaatttaaaaccaatgacgatattaattttgcatacgagtgatttctggggacacagcgtcagattgacaggattatggggaaggttttctaagtataaaagttagctctttttatatgagccttgattagatcaaaaaagcgctgaccaaaaggccagcactttgttatgaatctaaaacagtatcgaaacactgtttagaataagcaataacttgttatcttcaaacttaatcgtagatattcacgcgatcacgcaactctttcccaggtttaaaatggggaacgtatttaccttccagctccactttatcaccggttttagggttacgacctacgcgcggagcacggtagtgaagagaaaaactgccgaatccgcgcacctctatacgttcaccatctgccaatgttattgccatatggtcgagtatttctttcactgcatcttcaacggttttggccgaaatatgagattgctggccagcaagtctttcaattaattcagacttggtcatgagtacctccctaaactaccgcacttggataacacttacgtgttatccaccgttattcacttgaattattcgcctttcgctgctttgaaagcttcagccatcgcattgtttgcaaagtttgcgtcttcttgtttgttcacagaagcgatagcgtctttttcgtcagcttcgtctttagcgcgaacagacaagttgataacgcggtttttgcgatcaactccagtatatttagcttcaactgcatcacccacgttcagaaccagcgttgcatcttcaacacggtcacgagaagcttctgatgcacgcaggtaaccttcaacgccgtcagccagttctactgtcgcacctttagcatcaactgcggtaactttaccagtaacaatagcacctttcttgttcacggacaggtagttattgaatggatcttctgccagttgtttaatgcccagagagatacgctcacgctctgcatctacttgcagaacaacagccgcgatttcatcgccttttttgtattcacgaacggcttcttctccagcaacgttccaggagatgtcagacaggtgaaccaggccatcaatgccgccatccagaccaatgaagataccgaagtcagtaatagacttgatcttaccttcaacgcggtcatttttgttgtgagtctcagcaaataactgccaagggttagctttacactgtttcagacccagggagatacgacgacgttcttcgtcgatatccagaaccataacttccacaacgtcaccaacgttaaccactttggatgggtggatgtttttgttggtccagtccatttctgaaacgtgtaccagaccttcaacgccttcttcgatctctacgaagcagccgtaatcagtcaggttagttacgcgaccagtcagtttagtgccttctggataacgcttagcgattgctacccaaggatcttcgcccagttgtttcaggcccaaagatacacgggtacgctcacggtcaaatttcagtaccttaactgcgatttcatcgcccacattgacgatttcacttggatgtttaacacgtttccaagccatatcagtaatgtgcagcaagccatcaacgccacccagatcaacaaatgcgccgtagtcagtcaggttcttaacgatacctttaacttccataccttcttgcaggttttccagcagttgatcacgttctgcactgttttcagattcaataacagcacgacgagaaaccacgacgttgttgcgtttctgatccagtttgatgactttaaactcaagctctttaccttccaggtgagttgtatcacgaactggacgaacatcaaccagagaaccaggcaggaatgcgcggataccgttcagttcaacagtaaaaccgccttttactttaccgttgatgatgccggtaactgtttctgcgtcttcgtaagctttttccagcatcagccacgcttcatggcgttttgctttctcacgagacagaacagtttcaccaaaaccatcttcaacagcgtctaacgcaacatcaatttcatcaccgacctggatttccagctcaccctgaacatttttaaactgttctacaggaattgcggattctgatttcagacctgcatcaaccaatacaacgtctttatcaatagcaacaacgatgccgcgaacgatagcacctggacgagtttcaatagatagcagggattcttcaaagagttgagcaaaagattctgtcatgttaatgatcttcaagattttaatttaacgtccatttagcttcccgccgaatggggttgttttacatgccctgctactatttccctgtaacaaggttgtttggtttgcgaaaaaatttgatacccgcgtacctaatttttagtacatcgtcatcaattataagctaaaaacttaaaatcgctcaggtaattgagagaatttttttcgcataatttagcgccttgtcgatgacttcttcgatagacatactggttgaatccaatattaatgcatctttagccggcgctaacggcgcaactgcccggttacgatcgcggtaatcacgctcctgtatctcggacaaaagacattcaaagttaacactaaagcctttttcctgcaactgtagcatacgtctgcgtgcacgttcttctgcgctggcatcaagaaatattttcaccggagcatcagaaaacaccacggttcccatatcacggccatcggcaatcaagcccggtgcaacccgaaaagcacgctgacgccgtaacaaggcttcacgaacccgtgggaaagcagccgcctgcgaggcagtattgccgaccgcctcggtccggatctcattactgacatcctcgccctcaagcatcacactgagcttcccttttctagggacaaaacgcacatcaagattagcagccagaggaactaacgcgtcttcagactggatatccacctgatgatgaatcgcggccagtgccaacactcgataaatagcacctgaatcaagcagttgccagcctaaaacctctgccagtgcctggcataatgttcctttacctgcaccgcttggcccatcaacagttattactggggctatcgccaccattattgttctcctttagcatggcaagttaacacgtcaccagatgctgaatatttactcgataaaataatcaatatctgccgttgattatacgcactcacagagtgaacgaaataagcgcatgccatgtagatatacccgttatctttcaagttgcttctttgttggctgcactcgttcaccccggtcacatcgttatctatgctaccggggattcactcccttgccgtcgcgatccatcttgaaatccattgggtatagattttgatcaaagaaatacgctttattaaatcataataatcgataattatgactttcgctggcttaatctctccaattgattgaaataatcaggaaaggtctttgctgtacaacctggatcgagaatggtaaccggtgtatcggacaacgccaccaacgagaaacacatcgccattcgatgatcattataggtgccaatttcagcaggtaataatcttggtggcggtgtgatgcgaatgtaatcaaccccctcttccacctctgcaccgactttacgcaattcagttgccatcgcatgcagccgatccgtctcttttacccgccagttgtatatattgcgaatgacggtctcccctgccgcaaacaacgcagtggttgcaatggtcatagcagcatcagggatctcattcatatccatatcaatgccagtgagagtgccacgttcgcattcaacaaagtcatcaccccaacgaattttcgcccccattttctccagcacattggcaaatttggtatccccttgcaggctatttttaccaattccagtcacacgcacagtgccacctttaattgctgcggccgccagaaaataggaagcagaagaggcatcaccttcaaccaaatagtgccccggagaaacgtattgctgtcggcctttaatgtggaaaatctgatattgatcgtgatttatggtaataccaaaacttttcatcaatgccagagtgatatcaatatagggtttggaaaccaattccccctgaatatgaatctcagaatcattttccgccaatggcgcagccatcagcaatgcggtcagaaattggctggaaacccggccatctaccatcactttgccgccaacaaaaccccctttgacgtgtaacggcggataattttcctgctccagataatcaatttctgcccccccctgacgcaaagcatccaccagatgaccaatcggacgctctttcatccgaggttcgccggtaagaacgacgtcatttttgcccaagcataacgcggcggttagggggcgcattgccgtaccggcattacccagaaacagttctatcgggccttgatgggtaatcaatccaccaataccgtcaacttcacaacaggtacgatcatcagataaacgataactgatacccaacgcagccaaagcattgagcatatgacgaatatcatcactgtccaacaagttagttaaacaagtagcacctttggcgaaagccgccagtaatagcgcacggttagaaacactttttgaccctggcaggttaatagttccgttaatgtaggaaataggttgtagcatcagggattgcataaataacgggctctccggttctcgattacattgttttaattatatacccgtcatctttcaagttgcttctttgttggctgcacttactcaccccggtcacatcgttctctatgctcccggggattcgctcccttgccgtcgcgatccatcttgaaatccattgggtataagtgagtcatttttacgtttgaggaaatattttttacttgaatgagccgggaaccattgttcccggtaatgattgacaaattagccgttacggcgctcaaaatcagccataaaatcaactaaagcctgaaccccttctatcgacatcgcattataaatagaagcacgcataccaccggaaacccggtgccctttcagtgcctgcaacccttgtgcatcagcctccgccagaaacttgctatccagtgaggcatccaccatctggaacggtacattcatcagagaacgattttcaggggcaacctggttgcgataaaaatcactcttatcaatcacatcataaagcagttcagccttagctcggttgcgctttgccatctcttgtactccaccttgctctttcagccatttgaagaccaaaccagagagataccaggcaaacgttggcggtgtgttgaacatggagtcattctctgccaaaacagcatagtcgaaaatggacggggtttctttacgggctttgcccaataaatcttcacgcacaataactaatgtgataccagcaggaccaatatttttctgcgctcccgcataaatcataccgtaacggctaacatccaatggcccggaaagaatagaggaagagtagtcagcaataataattttattatcgctaaaatccggctgttcatgaatagcgataccatcaatagtttcattcgggcaataatgaacataagccgcatcatcactcaatgaccattcacgcattggtttaacgcttttcaagccattaatttcggttttgatattaatcacattcggtgtgcagtattttttggcttctttaactgcacatgccgcccaataaccgccatcaatataatcggctttaaccttgtcacccaataggttcattggaatagcggcaaattgaccgcgggcaccaccatgacagaacaatactttatagttttcaggcactgataataaatcccgcagatcattttcagcttcctttgccactgcgataaattccttaccccggtgactgatctccataattgaagtcccaataccatgccagttacagagctcctgttcagctctacgcaatacttcaacgggtaacatagcgggacctgaactgaaattatatacctgattcatttacctcaccttattctgacgaaataacaatgattgataacaataaataatctgatataccggttgtaccattcccatttcattgctgcaatggttattcaaacgttgaacaaaactatcgcaaaaatagccaataaacttattcattcagcgctattacaggtgaaccgcttattttttaccttttttatctacagcgatgagaggaaggaataatgtgaatggcgaatcgggtaaagcaataaaaccatgatgtcggtaaaattgcactgcattatcatcttttgcgtcaacaagcagcgcataagatgcaatttcggcacgaatggtcctctcaatagcatcagctagcaatgctccaccgagtccctgatttctaaatgcctgatcaacggccaacctccccatccgtactgccggcactgttgggtatcgtggcaatttcttaatagtagctgtcgggaggttggccaactggataccggcagcagccagagtataatatcccgctacacggtgatcatgaagcgcaacaaaacaagctgctacgcggcacctaacatcctgaccaacctgtctctgaaagtaaccatctagaaattctgaaccactgtagaacgaatcacgatcgtgttcttcgttgagttgcataacatcaaacatcgtggaactcattctgatcgtaacaaagagcggtgccgtgcaaatgcacgttcaagcgccggagtcgattccggtggattcagcaatgcctgcgcaaaacattgctgatcggccagagacaaacggagtacttctgactgctcaattgcgcgttgcgccgcatcctgtgcagcagacacaacaaaatcagtcatagtacgtccttgaatttcagcggcccgtttaatcagggcatgtagttcaggattcatacgcgcctcaaaacgcgcggtggaagtagccataatagacctcgactaaaattatccggcaaatttccgtacaaataatatcttagctactttttgagcagaatgctactttcaactgctagttttaatcagcgcgtttcctcgctatagcgcgcgaaactccgtcacccgcacgccctatttgttatctctgaatcacaaatcaatatttcacaaacatctcgtgaattttcaccggattacgtgtttcagtcagagctaattgtaaaagtactctggccttttgcggattcaaacgttcagaagcgacaaagccatgtttgctatcgtctacttccgcatcctgagtaacatatcccaccggtacacggcttgatctgacgaccacaaccccatctttagccgccaaggccagagtatcgaaaatcgccttgtacatattaccgttgcccacaccagcgctgacaatgccttggtaaccatctttcaacagagctttcgccggcagatcagacgcattggcatagttataaacaatacctactttcggtagcttatcgagtttactgacatcaaaaatagccttattggctctcggcttcgcgtcagcataataattgactttgccattatgaacaaagccctcagcacccgcattaactggctggaacgcctgaacttcggtggtgctcattttcaccacggtgcgcccactgataaccgcatcattcattgccatcaacacaccgcgtttggctgatgctgtatcaccggcaacgaccacagcgttatacagatttaacgggccatcagcaccaagcgctgtagatggacgcatcgctccaaccatgacaatgggtttctggcagtgggtagtcagatcgaggaagtaagcggtttcttccatcgtgtcagtaccatgggtgataacaaaaccatcggtcttgtcacaatcagcgttgattcttttcgctagcgttaaccacacctgatcattcatatcttgcgagccaatactcaccacctgttcaccttttaggttggcgatatttttgatctcaggaacagcattgactaattcatcaatggcaacccttccagcaacatagttggattggattgcagacttcccgccacccgcgatcgtccctcccgtcgccaaaagtgtaatatttggtaaagcaaaagcagaaccactaattaatgccaataaactggctaaagctgtgtgtttcatctttttcatgcttcttccttaataaaaaatatcctgttaaattatggatgatgataacaataaatctgtgatacataccagactttagctactgaaaaaaaactcgtatgatgagcgccccataacgagcactcataagtgaataccatgatgcaaacctttattcccggcaaagatgccgcactggaagattcaatcaaccgttttcagcaaaaactgcaacatcttggttttaatatcgaagaagcctcatggctgaatccggttcctcatgtctggtcggttcatatccgtgaccgcgattgtcctctctgttttaccaacggcaaaggtgctagcaaaaaagccgctttagcttctgctttaggggagtattttgaacgcctgtcaaccaactatttttttgctgacttctatttaggcgaagctatcgctaacggtgattttgtccattatccgaatgaaaaatggtttgctttaccggacgataattctttgccagcaggcattctggatgaccggttacaccaattttataatcctgaaaatgagttatgcgccagtcagttagtcgatttgcagtcaggtaatgaagagcgtggtatctgctcactgccgtttactcgtcaatctgatcatcataccgtctatattccgatgaatattattggcaatctttatgtttccaatggtatgtcagccggcaacacgatgaatgaagccagagttcagggattatctgaagtttttgaacgctatgtgaaaaatcgtattatcgccgaaggcatcagcctgccagaaattccccaggaagtgatgaatcgttatcccgacgttgttgccgcagtcagcaaattacaagatgaaggtttcccactctattgttatgacgcctctctcagtgggcagttcccggttatttgcgtcgtgctgtttaatcctaataacgggacttgtttcgcctcttttggtgcacatcctgaatttggtgtagcactggaacgtactgtgaccgaattattacaaggacgcagtttgaaagatctggatgtgttcaatgcgccgacttttgataatgaagaagtggcagaacatactaatctggaaactcactttatcgattcgagcggtttaatcagttgggatttattcaaacaagatgctgattatgcgttcgctgactggagtttcagcggcacgaccgaagaagaattcgccactttgatggctatcttcaaacaattggatgccgaagtttatattgctgactacgagcaccttggtgtttatgcctgccgtattttggttccgggaatgtctgatatttatcctgtggaagatttacatcttgctaataacacgatgggaatccatctgcgggaagctttattagcattaccggatagccagtggcaagccgaagaatatctggcgctgattgagcaattagatgaagaaggtttggacgattttacccgtatccgtgagttacttggcattgcggtaggtaaagataatggctggagcaatttacgaattggtgagctgaaatccatgttggcgctggcgggcggtgatttggagcaggctttaatttgggtagaatggacccaagattttaacacctcaatctttacggccgaacgcgctaattattatcgctgtttgcaaacactgcttttacttgctctggaagcgaataaagcgcctgcacaatattatcaagcattcataaaaatgtatgggcaagatgctgttgaagcagcatcagcagctatttctggtgaacactgtttttatggtctgtggtcagtcgatgcagatttaaaatcactgcccgctcatcaggctttattggctgcttatgagaagctgcaaaaagcaaaatgcgatttctggaacacaaaataaaattgtagaaaagacaattcataattaaaagtaaaatccaggttaaattaaatttatttgcaacaacaaataaacaacaatttgacctgtaattttacttactaaacgtcctactaatgggttaaataaaaaaatattataatttttaaaatttttttattttattaaaatcaataggttaaattgaatttaaaccgttttcactccccaaaacagagtccactcttagggaattatgatctatatcaaattctccccttcacgcctttgttactatcattacgtaccgtaacttattaatgataaagagaatgttggtatgaaagctgacaccccctttaacctattaccccctgcgataatgacacaaatcgccaatgacattggtgtttataaaacgactaaacctgttgccattacctatctgtcagcaataactgccgggatttttatttccattgcattcgtcttttatattaccgcgactacaggaaccacatctgtcccttatgggctagctaaattagttggcggcatctgtttttcccttggattaatgttagtcgtcgtttgcggagcagatttatttacttccactgtgttaacgattatttccaaagccaccgggcgtataacctggtatcaaatgatgataaactggattaacgtttattttggtaatttgattggcgcactatttttcgtcgccattatctggtttgctggtcaataccatgttgccgatggattatggggcctgaatgtcttgcaaacagcaaaccataaaatacaccactcttttattgaagcgctatttttaggcattctcgccaatttaatggtttgtctcgctgtttggatgagttatgccggacgtagtttaatggacaaaatattcgtcatgattttgccagtaagtatgttcgttgccagcggctttgagcacagtattgcgaatatgtttttaatcccacttagcattgctattaagcatttcgcaccaactgaattttggattaacgtgggagcaacacctgaacaattttctcaactcaccatttcacactttattactaacaatttaattccagtcactattggtaacattatcggtggcgctattttggtgggtttaacttactggtcaatttatctgcgtagtgagcaaaaacattaattagctctctcgcctgatttcttaaaagttcgattattacaaaggtagaagtatcatgactgaattaaataaaaagttctctgtagcatggcaagattttaaccaaggtgattggcaaagcgaagtcaatgttcgtgacttcatccaaaaaaactatacgccatatgagggtgatgaatctttcctgtcaggtgcgacaaaagcgaccgataccttatgggaaaaagtcatggaaggtatcaaaatcgaaaaccgcactcatgcgccagttgattttgatactgatgttgctgctactattacctcccacgacgcaggttatatcgaaaaagatctggaaaccattgttggcctgcaaacggaagctccattaaaacgtgccctaatcccatttggtggcatcaaaatggtggaaggctcatgtaaagtttatggtcgtgaactcgatcctaaattgaaacagattttcactgaataccgcaaaacgcataatcaaggcgttttcgatgtttacacaccagatattcttaaatgccgaaaatctggtgttctgacaggtctgcctgatgcctatggccgtggtcgcattattggtgactaccgtcgtgttgcagtatacggtatcgatttcttgcgtgatgataaattagctcagttcaattcattgcaggaaaagctggaaaacggtgaagatctggcaatgactattcaattgcgtgaagaaatcgctgaacagcaccgcgctctgagccaaattaaagagatggcggctaaatacggctatgatatctctggccccgccactgacgctaaggaagcaatacagtggacttatttcgcttatctggcggcggttaagtctcaaaatggtgccgcaatgtccttcggtcgcgtttccagtttcctggatatctacatcgaacgtgacctgaaagcgggtaagctgacagaagttgaagctcaggaattaattgaccatctggtgatgaaattacgtatggttcgtttcctgcgtacccctgaatatgatgaactattttccggtgacccaatctgggcaacagaatcgctggcaggtatggggatagatggtcgcacgctggtgactaaaaatagtttccgtttcctgaacaccctatacacaatgggcccatcaccagaacccaatatgaccatcctatggtccgaaaaactgccgacaaatttcaaaaaattcgcggcaaaagtttccatcgatacctcatctttgcaatatgagaacgatgatttgatgcgccctgacttcaacaacgatgattacgctattgcttgttgcgtcagccctatgattgtgggtaaacagatgcaattcttcggtgctcgcgcaaatctggctaaaacgatgctgtacgccattaacggcggtgtagatgaaaagctgaaaatgcaggttggcccgaaagaagagccaataaaagatgaagtgctggattacgacaaggttatggcccgcatggatcactttatggattggctggcaaaacagtatgttactgcactaaacatcattcactatatgcatgataagtatagctatgaagcggcactgatggcactgcacgaccgtgatgtttaccgtactatggcctgtggcattgccggtctgtctgtcgctgctgactcattgtctgccatcaagtatgccaaagtgacaccgatccgtgatgaggatggtttagcggttgatttcaagattgaaggtgaatatccacaattcggtaacaacgactcgcgtgttgatgatatcgcctgtgatttggttgaacgtttcatgaaaaaaatccagaaactgaatacttatcgcaacgcggtaccgacacaatccgttctgaccatcacttctaacgtggtatatggtaagaaaaccggtaacacccctgacggacgtcgtgctggcgcaccatttggacccggtgccaatccaatgcatggtcgcgatcaaaaaggtgccgtcgcctcattgacttctgtggctaaattgcccttcgcctatgcaaaagatggtatctcttataccttctctatcgtaccaaacgcgttaggcaaagatgatgaaacacgcaaaactaatctggctggtttgctggatggttatttccaccatgaagcagaaattgaaggtggtcagcatttgaacgtcaatgtgatgaaccgtgacatgctgcttgatgccatggaagaccctgaaaaatatcctcaactcactatccgggtatcaggttatgccgtacgtttcaactcactgactaaagagcaacaacaggatgtaattacccgtactttcacccaatctatgtaataatttgttagcacaggccctgaattttagggcctctattcgtttatcctgccagttttggagtaaacctgttatgtccgtacttggtcgtatccactctttcgaatcctgtggcaccgttgatggccccggtatccggtttattgttttctttcaaggttgcctgatgcgttgtctctattgccataaccgcgacacatgggatacccacggcggcaaagacgtgaccgttgaagaattgataaaagaagcaacagcctatcgtcattttatgaacgcatccggtggcggggttactgcatcgggtggtgaagccgttcttcaagctgaatttgtacgtgactggttccgagcctgtcatgccgaaggtattcatacttgtcttgacactaatggatttgtccgccgctatggtccagttattgatgaattgatggatgcaacagatctcgttatgctcgatttgaagcaacttaatgatgagattcatcagaaattagtcggtgtctccaatcatcgcaccttggagtttgcccgctatctggctaaacgtaaccagaaaacttggatccgttacgttgtagttcccggctggtccgatgataatgagtccgctcataagctaggtgaatttaccaacgatatgaaaaatattgaaaaaatagaacttctgccttatcacgaactgggtaaacataaatggacgactatgggggaaaaatatcagttggaaggtgtaaaaccgcctgcaaaagagactatggagagagtgaaaaacattttggaaagttatggtcataaggttatctattaattaaattatttaacttttatctctgaaataaagtcgcaataacaccttcagaatatcaatggcttttaatcattgcattatgtggcaagttccccggtactagaatttttaagctttgataccttacaacaaaggggttcacgaactctgttcggatgccaaaatcagtaataaaaggtcacatcaggcacatgaacattgaggttttgacgaaacagaacgagttatttgtttccgcaaacaactcacttaatcgcgttccccatgctcttatggcccctataaagctgcttccgtctgataggtttcagcttcgccgggcaaacgtaaaaatcccttgtataaccatcatcctgaataagaacaaaaatgccgaacttgaatatcggcattttgctgtgaaagaggagattaatttaatgctttaacgcttcgattttatcccggctcaggccggtactggtgacaataatgtccaaactcacgccatgccgtaataaggcacaagccgtttccagtttaccttcctctcggccttcttctcgaccttcctctcgacctagctcaataccttgcttgatacctcgctcaagccctttttgttcaagctgttctgcaatagtcatcaacatcgtttcatgctccggagattgttcaatcagttgatggacaaaatgtgagagatccagcgtatgtccattcagtaaaatatagagtaacaccacattgagctgctcggttgtattataccctgcattcaagagttccaccaattggaggagccattcctgcatatcccgacagcgaatatgtttttgcaccagctccatcagggcaacccctttatgcgtcaggatctcttcatcgctgagcacactgacgtccaccaacggaaacgcctgacggtataagcgagccgcctgttcggggagcgtgaaacaatccagccaccggtttgagtaaggatacggccgaatctcaccatgataaaacagcagaggtgccaccaacgggagttcagtatggccttttttcaggtgagccgccatggctaacatggcataatacatcagccgccaggccattaacgggtcaggggtggactgatgttcaatcaggcaatagatatagccctgtccccgggccgtttcgaccgagtacaacacatcactgtgcagttgacgtaaatgctcatccacaaaactgccgggctccagtttcaatgtggctaaatcacacaacaactggatttcttcgggcaaataaagggatagaaactctctggccgtttcaggctgcgttaaaaaatatttaaataatccgtcatggtgaggccgtttttctttctttgccacaatctgtttctctgtattattagttagtcattaccatttatagtatttctaccaagctacaaaaaacatcttcccatattttctcaggcaaatctttaccgaatgcattaatagaagagcctaaagaaccaaatatcagaaaagaaaaaaagagaaaacattatatttacaacaaccattcaatgaaagccatttatttaaatgagtttttaacttgtattcgaataataataatcccgttatcaaaatatcgattatttatatttctgttaatcttggactcacataataattgccactctcattagaagaaaaatttacaatggattttgctaaaaccctacgtcttaaaacacgctaaaaaagtatccttacaagtgaaaacaaaccttgacttataattttaattgtatatttttagttcataacactattttaagctaaattccaaacaacaggttactcattatggatgctttagatgaattttacgaaagaaacccttccgccagaggatacttggataacagtaccaaacataccgtccaatacttcattttctgacatcgctattcccaaaagcggagacgatttatcaacaggttttttaaatgttatgggatggtgcttgacatgctgatcccaagttaaagaatgattgagattatatatgaatatctggtctgtatgatctaattggcctttatttcctattgaatctatcgacgaacaacctgccgatatcaagccctgcttatagccctttaaagttaaatagattaacggcctatcccaatagggctattttatttgcccttctttgccataaagagcgaacctaggcagtgctcaaaatcctcacgtactacgtgtacgctccggtttttccgcgctgtccgtgttcactgtccattgataagaatggcctacaacaattacgcctattgggataggcactaagcctgacatatatgctccttctcagcgttaaaatgccaactactaactattagtagtgcttttcattctacagaaaaaaacactcaatggaattaaaattattccgattacatggggtagaagttaattaaattcagccgtcagttaacattgaaacactttattacaattattatcaatttgataaaattaaaaacacttagcaatactttgtatgaggcggattcgactaataagtgcaatttttcagaagggcggtcagttgctatagtaggcatctttctcgccaaaggaaaatgcactatggcctatacacaactgacccgaacagaaagataccagaatttcagtttaagagaagcgggttttcacagctttttattgcgaagtcacttaagcgaagcccatcgaccatcagcagagaattgaagagaaatcaagaagtccagacatactgccctgaacaggctcatttgaaggtattggcgcgtcgtcattttgctaaaaaggccgtgaaaataacgccggaagtaaaaagatggataaaacggttaatttggaaagatttaagccctgaacaggtggctgattatttgaagcaacataaagggatatctttgcatcatgagacgatttatagactgatttatcaagataaaagagaggggggtgatttatggcaacatctgcgaatagccagaaaaccctatcgcaaacgctatggtcgctatgaaagaagaggtaaaattaaaaatcgggtcagtattgatgaacgcccggaaattgttgataaaaaagaacgtattggggactgggaaggagatacgataatagggaaagataaaaaaagtgtcttattaacattggttgaccgcaagacgctgtatacaattatcgttaaacttgatagcaagcaggcatcagaagtcgcgaaagcagcagtgaaagtattatacccgttaaaacaaaaggttaagaccatcacgttcgataacggtttggagttcgcagatcatgaaatcatcggtgaagaattagaaacccaaatttactttgctcacccttattcgccttgggaaagagggatcaatgagaatatcaatgggttaatcagacaatactttccaaagggaaccaattttaatgaaatctctgatcaggaaataaattttgtggtaaaccgattaaataatcgtcctcgaaaaacacggggtgggaaaacaccgaatgaattatttaaaggaatacgaacatgtttacttccagattaacgatgttgcacttattatgtgaatccaagggaaattatttatcttttctggtcgttacttatatttaatgcttgttgaacaatagaattaatataatatatttacctaatctctcaatctgactgtatcttacgagataaagtcaagccggtgactttaaatatcatgcatcaacacattaattggaaaattatatggataatcaaaacttaaattttaactccaacgctatgactaatgaccatcaggaagtatttattcctaatggtcagtccctcagtagcacagagggtgtgaaatggattggtcaagcatggcaacttgtcaagaacaagtggggtatgtggatactactctatattatctataccctatggatttcaagatgcatcgcgacggcaagggagcgaatccccgggagcataggtaactatgtgaccggggtgagtgagtgcagccaacaaagaggcaatttgaaagataacgggtatattctatatgtatagctggtttcatgcttattccctttattggaatatttaccttgtttctgaacccagtatttatcggcggtataattgccgtgtgcgaaaaacagaggactagcggagaattcgagctaagtctgttgttcaacggatttcagaaaaactttgcatcactgctcggcattggtgctttaacgcttggtattatactcctcggtgttatcgcaatgtttattgccggtggtagtgccgtaattcatattctattagccgctcaacatggtgaaatttcagtcgaaatgcttcaaaatagcctgttctcattacttcttggtctctttattctgatggttttctcaattgtgaatgccgcattgacctggtttgcaccagcgctaattgttatccataatttaaaatttggggccgccatatcaatgagcctggccgcagtgaaaaaaaatctattacctggtttattattctttatcacctccgcgctcattttcataatttcggtaatgacttttggtttaagttttctaatctctataccagtacttttagttagttattattcttcctaccgcagcatttttatcagtaaggagaaatcatccacattttaatcgactaaaaaatacttaggttgacaagcctcgctattttaaacgaggtttgtttttttatgatgggaaaactcctgccattttcccgatttaactcgtttgattgctattagaggctacatttttaccgcagagcgtcaaccacttaaggatcgtttaaaacgagtaaaaaaatccgaggttatactaatattagaagaaaaaacatcaggaaaaacaaggtctaaattttttaacaaagtggaaaaacaacaaatcaccgcattaagcaaacttgcttaaccaaaagattttacgtagtcgtaatacattttcgcaaaatcagataaatcattaaaagaagccggaaaatccttagattaaccagattaaccgcaaaaaataaaaaagtttaacaatattaaaaactattaaagaaatgggccttgattttaataccattaatgccagattttcaaaaagtacaggcgctaaaaacagcctattccccgtcgtgtttaatgcatttatcgacgattttatccccctctcattttacatttatttaaactgccataaccatttaaaagcacgaacacagagagattaaggtttttatgtggcaggaagatttaactatagtgcaattttttataaaggcaattagtcatacttaatcgaaggttattaactattaatagagaattgaaaagaaatcagcatgcaaaggaatattatccgaatagattgatattaaggtgttttctcgccattattttatgcagcaagccatagagataacttaataaaaaatggataaaacggttaatgtatcaggatttaaaccctaaaaaagaaaaggattattcgagaataacatatagggatatctttatacccaatggatttcaagatggatcgcggcggcaagggagcgaatccccgggagcatagataacgatgtaaccggggtgagagagtgcaaccaacaaagaggcaacttgaaagatgacggggatatatcatcaagctatttactggctgatttatcaagataaaataaaggtaaaacagagtcagtaaagataaagcaagtatgattaatgttgtttaaccgtaaaacacgatatttcataatgattaaacttaataaaaagcagatattcaaagtagtaaaaaatggttaaaaccttatgtcaattaaaacctaagattaaaacaatggtttttaataacagcacaaaaccttcccttgataaagcttatcagtgaaaacaaaaattaatttattaatgcttatataacccagaaaataagggtgtgaatagtttgatcaaacaatctatttttccaaaggaaacggctttaatcgcgttttcaaccacaagagtaattttttcataaccagttaaataattgactatcaaaaaccagcattgaaatataaacattaattaaattctataaaataagatacaatatattacagagataacttagttatttaggcaatggtaaaaccatttgatcaagttaaaaaaataaatagcaaagtattgcttataaacccaccacattgtcaggtaattactcctatttagtacttgttatttaataaaatcattataatatacttgccagctttttacggatgaccgtgactttcaaggtgcagacagaaaaagaaaccaaataaattacaaatcaatatttaaattgaaaaatacatggataataagaacctaagttttaattccaaagctatataccctatggatttcaagatgcatcgcggcggcaagggagtgaatccccgggagcatagataactatgtgaccggggtgagcgagtgcagccaacaaagaggcaacttgaaggataacgggtatatacaacaatcaggaggtatttatccttcattccgcacctaattcaggaataaaccgctttatattgtgcacctaataaactcaaaagctcatggtggtaagattgcattcctgtcaccattttatgttcttgaaattcaaaggtgctgatcccttcaaaggccagaaatacccaacgcgcggtgggggattgtgtcggtttgttcttcatatcggggaaaaacggcacattttgtttcaattcatggcgaattttatgttccagcgccgcataaaccatgagacaacatgtcatcaccattaacagcgcttctatccgctccggttttttcaggaaaatggcagacgtcaggaattccggacttttcaggaagcgaaaaccccgctccaccttttgttgtgccttataattagccagtaacgccgccatatcaagccgtccttcatcccgttcattggtcgctaaaataaacctcccgacccgcaatctggcctgcttcaccttgtctaaccgggtataagcctgaccggctaattgataatgaaccgatttggggggttgatgcttgccgggtttcccgcgccccgcatacgcggtaatcgcctgaatttccggcgaggcgatgccgataaactggcattgagactcaaaatcatgcagtgcctgtaaggcatcctcccggcaggcaaagggctttttgcccagtttgtcgaactgtttagactcgttttctgtttccctgagtgtgtttttccggaaagtctggttttcacgtttttctgccgccgtactgttcaccagtaaccaacgctgaggaacgccgccatatgatgacgtcacccagcagcctgaatagccctcactgatggggctgaattgctccgctgtcacgttcaggagagactgtttagcttccttgatcgtcaggggaacacgcgtaataaatcgttgtttttgctgatgaagcgaagcgatcgcggcttcagtataaagggcggcatcggccacaaagtagcggctgttttgtgctgctttcaggcattgaatatgggttttgatcgtctgggcaaaggctttggcatcattcgtattcccgctcatagcctgcatatagacagggatacctgcctgattttcgcaaatcagttcaaggacaacctggttcagttcaggccggtgatcccggctataacccggcaccagtgcaatacgttttgtgtcatctcccaatgcgctgtcatagtcaccatcgacatgaaaactcgtgatatccaaatgaacggaatcgggatttaaccctaatttatcaaccacttgctcagcaagcacctgataaacttccgacacccccgcttcatataaggcatccagtgtacggccgagcacatcatcattaaggtgttcagcttcaatgtcagcaccaattaaacgcgcaatcggcttatgttgaaaaaagccggaaaacatgtgcaatgtccggctgtgaaaccccagcccgttaaggatcatcgccagaaaagcgtcgccgtgagagacagtatgcgatgaatattttgggataatggcatcaatcatgcggggtaaaccggcttcatgacaaaaagcggcgataaggccaagatgatcgagacgtttaatggcaggtataggtgtggacatattcgctttccggcaaataaaagtaatagatcaaaattggcgattaccgtcaaccccaccgatgtcatcaatacaaaaaacctgtgtaagatcacattatttttaaatcagaaatacggtgcggaatgacggatttatccctagtggtcaatccctcagtagcacagaaagtatggaatggattagtcaagcatggggtatcgtcaaacgtaaattgggtatgtggatactacttagtatcatttatttcattatcatatttgttttacagcttattcctttccttggggtatttactgtactttttggtccagtatttttgggtggtattattgccatgtgtgaaaaacagagaactaccggagaatttgaaccagggctgttattcagcggatttcagaaaaactttgtatcactgcttggcattggtgctttatcatttggcatcatgcttcttggaattgtcgcaatgtttattatcagcagtagtacaatggctcatatattgttagataaccaatatgatgagatcccggttgaagtattcccaaatgatctctctccattataccttggtgcttttgttctgattatttttaacatttttggtactgctttaacctggttcgcaccagcattaatcgtcattcataatttgaaatttggggctgccgtgtcaatgagtttggaagctgtgaagaagaatttattacccggtttcttattcttcatggtcatggcagtaatgttcataatttctatcatgactttgggtttgggccttttaataaccattcccctatttttagtcagctattattcctcataccgtagcatttttattggaaaggagaaattatcttctttaattatttaactctttattaaatctaataattttattttcaacaaaaaaatcaataaaaacgaagcaaaaagcgccaaatctggcgctttccattaatacaataatcaaccaatatattccaaaccacccatatatggacgcaatacttccggtatttcaatacgaccatcggcttgctgatagttttccataacggcaaccagagtacggccaactgccaaaccagagccattcagggtatgaagtaattgagttttcttatcttctttaccacggaaacgtgcttgcatacggcgcgcctggaaatcccacatgttagaacaggaagagatttcacgatatgtgttctgagccggtaaccacacttccaaatcataagttttacacgcgctaaaacccatatcaccggtacacaataaaactttacgatatggcagattcagtaattgcagcactttctctgcatgccctgtcaatgcttccaatgcatccattgattcatcaggatgaacaatctgaaccagttcaactttatcaaactggtgcatacgaatcagacctcgggtgtcacgaccataagaacccgcttctgaacggaaacagggggtatgagcggtcattttcaatggcagttcattttcatccagaatgtcaccacgaaccaagttggttatcggaacttcagcagttgggatcagcgcgtaatggctttccgcctcttcttccagcggcttagtatggaaaagatcttcaccaaatttcggcaattgacccgtaccatataaggtttcatggtttaccaaatagggaacataagtttccaaatagccatgctgttctgtgtgaaggtttagcataaattgcgccaacgcccgatgcagacgagcaatttgccctttcatcaccacaaaacgtgaacccgttagtttaaccgcggcagcaaagtccagaccattggtcagttcacctaatgaaacatgatcttgaatctcaaaatcatatttacctggctcaccccaacggctcacttccaaattatcgttctcatctttacctaccggtacagaatcatctggaatgttagggatacttaaagccaaatcacggatttcagcctgaagtttttccagttcagctttcgctgtatccaacttttcacctaactggttcacttcctgacgcagtggatcaatatcttcaccacgggcttttgctgcaccaatagctttcgatcgggaattacgttctgcttgcagggtttcagtttcaacttgtaaaactttacggcgctcttcttgtttgcgcagcgtatccacgtcaagggtatagcccctgcgagccagtttttcggcgactgcgcctagctcattacgcagtatgtttggatcgagcatgctagtcctgtgcttgtcgttattaagttatacccgctatctttcaagttgcctctttgttggctgcactcactcaccccggtcacatagttcgctatgctcccggggattcgctcccttgccgtcgcgatgcttcttgaaatccatagggtatagatgatatgaataagcccacacaagttgatgggccataaggtatttttacccgtcaaccttaccgcaacaataacgttagcgatagcgttttatcgggctattttgatcctgttcagcaagccaggcgagtttatcgcctattttaccttctaaccctcggttagtcggatggtaatagcgggtttcccgtatctcaggtggaaaataaacttcacccgccgcataagcattaggttcgtcatgggcataacgatattcttcgccaagccccatctctttcatcaattttgtcggtgcattgcgcaaatgcacaggaacatcataatcaggtttttctttcgcatcagccatcgctgctttaaaagcggtataaaccgcgttacttttcggcgcacaggcaaggtaaacaatagcttgagcaatcgctctttcaccttctgccggcccgacacgcgtaaaacaatcccatgcagcaatagctacctgcattccccgaggatcggcattaccaacatcttcggaagcaatagccaataaacgacgggctacatataacggatcaccgccggcggtaatgatccgcgcataccagtaaagcgcagcgtcaggggcagagccacgaacggatttatgcaatgctgaaatcaaatcgtaataacgatcacctttattatcaaaacgagcacttcgctctccactgacctctttcaatagcgccggtgtcaaaaccctctgtccctgagcattggtttctgccatatccgccatcatttccagcaaattcaatgaacgacgggcatcgccagcaaccagctccgcgatcatgtgacgggtattttcaggcaaaacgatattctgaccatgataaccgcgctctttatcactcatggcctgctcaagcacctgctcaatctcttctgttgtcaatgatttaagcagatagacacgtgcccgtgaaagtaatgcagaattcagttcaaaagaggggttttctgtcgtagcgccgataaaggtgatcgtgccatcttcaatgtgtggcagaaaagcatcctgttggcttttgttaaatcgatgtacttcatcaacaaacaggatagttctacgccctgcattccggttctgacgcgctttttcaatcgattcacgtatctctttgatgccggaagtgaccgcagatatccgttcaacatcagcctgagcataatgcccaataatttcagctaatgttgttttgcccgtccccggtggcccccataaaatcatggagtgcagttgtccagcccggatagcccttggcagaggttttccctcagcaagtaaatgccgctggccgatatattgctctaatgtcatcggccgcatacgcgcggccaatggccggaattcattttgagaaaaatcgagtgacaggttgttcacttaaacctcactggcgctgatcatccagcgtaacgcctttcggtaacgtaaaactgaactttgccgcatctacgtgggtattttgctgcccttttagttgataagcactcttttgtccatcctgctcaatagcagaaaatttttggatagtgccatccgtcgtaacggtaatcgagaaacgtttcagattaccagtgacattattcggcgtcagttcaaaatcattcccttgctggctaattttatattgagaccattctttagcatcgttacgagtaattagcataaatggcgtattacctgtggcatctttcaaccaattagccgttacctgctcaacaaacggattatagaaccacaatgttttaccatccgataccaaaacactttcatcaggtgatgtcatatgccaattaaataggtttggacgtttaacccataattgcccctcaccttcctgaattgttgccccatcatcactggtgacggtttgagtaaagctagcatgaaaactatttactttacccaaacgttcctgcaaattttggctagcattcgcccatgccacattgatattcatgccagccattaaacaaccaatcaatatcagctttttcatgtcagagatacctttctcagcgttattacttctttctcaacgttattacttcaagtgatccattatcagggtcttcaacgttcaatattcatataccctatggatttcaagatgcatcgcgacggcaagggagcgaatccccgggagcatagcgaactatgtgaccggggtgagcgagtgcagccaacaaagaggcaacttgaaagataacgggtatatcagctctcatgtggtggtggcgctaatacttcacgattaccattatgacccggagcgctgacaatctgctgtgcctccatctgttccacaatacgcgccgctcggttataaccaatacggaattgacgctggacaccagaaatcgaaactcgtcgcttttccgtcacgaattgaacggcctgatcaaacagggcgtctagctcttcatcactatcaaaacctgagcccccctcagcatcatcaccaccactgagaatgctgtcaacatactctggacggccgcgggctttccaatcattcaccacttcatgaacttcctgatcccgaacaaatgcaccatgaacacgcaccggaatcgaggagtttggtgccagataaagcatatctcccatgcccaacagggattcagctccgccttgatcaagaatggtgcgggaatcgattttgctggaaaccgtaaaggcaatacgagtcggaatattcgctttaatcaagccggtaataatatcgacagatgggcgttgagtcgccagaaccagatgaataccagcagcacgtgctttctgtgctaatcgggcaatcagctcttcaacttttttgccgacggtcatcattaagtcagcaaattcatcgaccatgacaacaatgtacggctcttttttcagcaccggatgaataacatccatgctgtcacccggcttccagaatggatgaggaattgggcgtcccatctcttctgcctgcttaactttttcgttataacccgccagattacgcacacccaatgcagacatcagtttataacggcgttccatttcaccgacactccagcgcagtgcattagcggcatctttcatatcggtaacaacttcggttaacaggtgaggaatgccttcataaaccgacaactccaacattttcgggtcaatcataataaagcggacatcctctggttttgctttatagaggatactgaggatcatggcgttaacaccaacagatttacccgaaccggttgtacccgccaccagcaagtgcggcattttacctaaatcagcaacaaccggctggccgccaatatctttacccaacacaattgtcagtggggatggattatcgcggaatttttcacaatccaatacttcacgcaaatagaccgtctggcgctttttattcggcaattccaagccaacataaggtttacccggaatcacttcaacaatacgcacagcaaccgctgatagagaacgtgctaaatctcttgataagttggaaatacgtgatgctttaacacctggagccaaatccaattcaaaccgggtaatcaccggaccgggtgaaaaacccacgacatcagctttaactcgataatcactcagacgcgcttcaatcaaacgggacgtttgctcaagggcaaacatatcaacgggttcctcttccgctaaaggactggttagcagatcgagcgaaggcattggtgtcgtcggttttggcaacggttgatcgttacgaaccaaaaacggatgaaataagctatcttgctgcggttgctgcggttgctgcggttgctgcggttgctgcggttgctgcggttgctgcggttgctgcggttgctgcggttgctgcggttgctgcggttgctgcggttgctgcggttgctgcggttgctgcggttgctgcggttgctgcggttgctgcacaacattgtgtacaggtgctggcgcaaaagcaatttctgtaggccgttctaattgattttccggtgctgagtgaacagaaggcataaatagcggctctgctggctctttttcaactaaatcttcaaccggtgaaaaattatttaaaatcgataaactctccagagcagaaagctcttttttctcctgatgaccttgctcctgataacgcttatattgcggctgctcaactgtctgtttaacagtctcggtcgctgtttgagcccgttcttccaccgaaggctgattttccggctcaaatggattctgtcttatctgaggctggattggggcctgttcttctgtatccgtcgtaatacgataacgctcgcgctgttgttcaagaaactgctgactcagcaacacttcttgctgtttatcagactcaatatcatcatccgctccaccgacttgttgtttgacctcttcttcacgctgttgttctgcaagacgttgtgaaggcactttaatgccatacagttcacggcgggttggaatacggacaggattaggacgaggcagttctggcccgattccttgcttaacctgagaattgcctgttataaccgttgcagaagttgctgctacaacattttttggttctgtttcaggcataaaagtgaaggtgtcgctgctgttccggctattttcgacgggttcaaatgtcggcgtcccttgacggttaaattcagatataggctcaaaatggtactcagcaggaatttcaaacgtataacgaacaggttcgtcgttattattcttttcactctcttccactaatggctgagactggacaataccatcatctgatgtattaacccgaatttcaggttcagcatcaatattagccatattagtggtaggaatatctattggctgttcttgttcgatttcgatttctgctttcaccgattcgggttcgtccagttcagcttttgctaactctacggctgaaggtgctgtaaatagcacatcatcatgatcaataccagccgctgtgaattcaggttctgttttatcatcggcgagatcttcccgcgcaatagccgtttcatcgtatggcgtatattcttgttcattacggctgcggttggtaatcaatcctattgctcccagaatgattgctcccgtcttttcagcaatggttaaccatgaccaaccagtaaataacgtcaacccaattgcccaaatacacagcaagaccaaagttgcacctaattcattaaaccaaggcaacatcgcactactaaacagactgccaataataccgccggaagcaaagtaatggagatcgtcaacattcagtgccgctaatccacatgaagtcaaaacgattgccaatgcaccaataacgcgcaaagccaacgcaaagaaatcaacatactctcggtcatcatgttgcttaaaagcagtccagcaacccaatatcatcactggggggatgacataagccagaatgccaaatgcagaaaacagcgtatcggccagccatgcccccacaccaccccccaaattatgcaccggctcatgccatgcagtctgagaccaactgggatcagaagggttaaaactgacaagtgcgaccagcagataagctgctaggataacaatgacaagcagcacagcttctaacagcctgcgcccactactcagtctctttaatttaatatttttatcttctgtatattcctggctcaagaaaggctctccaggtttcctgttgatttaacggaacaacgccgagatagctcagcgttggaactgtatgcataaacaggagtgtacctaagtttttccagttttgcacctgtacatttttggtaagattttagcgagtcttaatgaccagacgattgctctgcttaacttcttccatcacaacatatgtgcgagtgtcattaacacctggcaaacgcaacaaagtttcgcctagcaacttacgataagctgacatgtctggtacgcgagttttcaatagatagtcgaaatcaccagaaactaagtggcattcctgaatctcttccaatttttgtacagcagcgttgaattgttcaaaaacatctggagcgccgcggtttaaggtaatttcaacaaataccagcaaagatgcatccaaatagtgaggattcagcaatgccgtgtatccagtaataaacccttgacgttccagacgacgaactcgctccaaacatggggttggagataaacctacccgtttagacagttctacgttagaaattcgcccatctttctgtagctcatttaggatattacgatctatgcgatcaagatcttttcccggacgttttttattatctatcatcttgttgatctctctttattttcctacacccataacattttcccctatctcttgagtttgagttggaaaagatgtcttaaagttaaagcctcgctctatacagcgtaaagcaactcacaggccatttttttaatgctactagagggaattatccgcatgtcgatttttatagaaacgaatttagcgaggtggataattatctcttacagtgatgttttcgcaaatgcacagccgattgtcaaagtaaatgagcaaaaatcagaacaacctgtggaacaaattttcagttaatcgtttcgatagtctaccattaattgaaaatgagcaaataaaatccaaaccgcactaaaaggacacttttctcaggttaaaatcattgttagttaatatctatcggtaaaatcgttagtaacatgagtcttttaactttttttaccctcctatttctcctacaatcgttcgatattcgataggtgataatatggaaatgaggtattcatgagcgccgccaaacaccacaaacttattattcttggctccggtccagcaggctatactgccgcggtttacgctgccagagcaaatttaaatccggttcttattaccggggttgaaagaggcggtcaattgactacaaccaccgaggtcgaaaattggcccggtgatccagaaggtctgaccggcccagggttaatggaacgcatgcaccaacatgctgaaaaattccaaaccgaaatcatttctgaccatattcaaaaagttgatctgcaaagccggcctttacgcctttatggtgatgagcaagaatatacctgtgacgcactgattatcgcaacaggtgcttctgcccgttatttaggtttaccttctgaagaggcattcaaaggtcgtggtatttcagcctgtgcaacctgtgatggtttcttttatcgtaaccaaaaagtcgccgttgtcggcggtggtaataccgcggtagaagaggccttatatctggcaaatattgcagcggaagttcacctaattcatcgccgtgatacattccgttcagagaagatcttgatcagtcgcctgatggataaagtcaaaaatggcaatatcatcctgcatactgatcggattctggatgaagtactcggtgatgatatgggcgttaccggtgttcgcctacgcgataccaaaagtggcgctacagaagaattggctgttaccggcaccttcattgccatcggccatactcccaataccgctatttttgaaagccaattagaattggataatggttacattaaagttcaatccggtttacagggtaacgccactcagacctccattcccggtgtattcgccgccggtgatgtcatggatcatacttaccgacaggcaattacctccgctggtacaggttgtatggcagccctcgacgcagaacgtttcctggatgggctagccgctaaataaattctttttctttcaaggcgctatttcggtagcgctttttaacatgtaacatatcagcaggatgctgacacataggatatgtccagccttttggtacaccattaccctcacctgttgaattagaatttttccttatggataaaacaagacagtatgaattggttcgctggctgaaacagcaaagtgccccggcccaacgctggctccgcctgtccatgttatttggcttaatcagtggattattgattattgctcaagcctggctactggcctcaattctgcaagctttaatcatggataatcttccacgcgagcacatcacgaacgaattttggttgctagcagccacctttgcgttacgagctatcatcagtgctattcgggaacgaatcggttttatttgtggcaaaatcgtgcgtcagaaaattcgcgctatggtattggataagctggaacaacttggcccaatgtgggttaaaggcaaaccagccggtagctgggcaaccattattcttgagcagatagaagatatgcaggattattactctcgctatctgccacagatgtctcttgccgtcataatcccgattcttattctgatcaccctattccctgttaactgggctgccgggctaattttattcgctactgctcctctgatcccgctatttatggcactggttggtttaggtgccgcagacgctaatcggcgtaattttgtcgcactagggcggttaagcggtaattttcttgataggctacgtgggttagaaacgttgcgcctgttttatcgcggcaaagcagaaacacaacaaatcagcgaatccaccgaaaacttccgttacaggacgatggaagtgctgagattagcgttcctttcttctgcggtgctggagttctttgctgccatttctattgccgttgtcgctgtctatttcggtttctcctatttgggggagcttaattttggcagttacgggatgggcgttactctgtttgccggttttctggtgttaaccctcgccccagagtttttccagccattacgcgatctgggtacttattatcacgctaaagcccaagcggttggggccgccgaagcattagtgactttattgagcagtgatggtgaatatgcacctgctagtggtgataaaacacttcccccccaagatccgttgaccatcattgctaataatctggaaattttggcccacgacggcaaccggcttgctggcccgttgaattttactatagagaaaaatcaacgggtggcattagttggtcaaagcggagcaggtaaaagttccctcttgaatttactgttagggtttctgccctatcgtggttcaatacaaattaatggcaccgaactgcgtgagttggatcaacagagatggcgtaaccaactgagctgggttggacaaaatccacatctgcctgagcagactttgcttgataatattcgtctgaaccaacctaatgccaatcaacaacaaatccatcaggttatggaacaagcatgcgtcaccgaatttattcacgatttacccgatgggctgaataccattatcggtgataatgcagcacgattatccgttggtcaggcccaacgtatcgcggttgcccgtgccctattgaaaccttgccggttattattactggatgagcctggtgccagcctggatgcgcatagcgaacaacaggtgatggcaacactcaatcaggcatctcatcatcagacgaccctgctagttacccatcaagtggaagaaacgctggaatatgatcagatttgggtcatgcaaaaggggttgattattgaacagggagattaccagacgctaagccaatctcaaggggtattcacccgcctgttatcccatcgaagtgaggagctgtagttatgcgggtattgcttccttttctggcgctctatcgtcgtcattggtttcttatcagtttaggcatggttctggccactgttacactactcgccagcataagtttactgaccctctctggctggttccttgcaggcgcagcactagcaggtcttgccggttatacattcaactatatgctaccggctgccggtgtccgtggctcagccattcttcgaactgccggacgctatgctgaacggttggttagccatgatgccactttccgggtattggcacatttacgggtttttgcctttcagaaaattttgccactttcaccgggaggaatagctcgttttcgccaaggcgaattattaaaccgactagttgctgatgttgaaacactggatcacctctatttacgagtgatttcgccgatattatcagcttttatcgttatcatggtcctcactttcggccttggctttctcgatctcacattagcctatacccttggcggtattatgctggctctgttgatcctgctgccatcagtattttataacgcaggtaaatccgttggtcgcaatctgactattctgcgtggtcaataccgcacccaactcacagcggcattacaagggcaagccgaattgatggtattcagtgctgttggccgtttccgcaagtcaatggctgatatcgagtcacgttggttaagatgccagcaacagcaagcgaacctaaccggcttgtcacaggcaatcatgatttttgccaccggtatgactgtcacattgatattatggctggcagctaacggcgtggggggaaacagccagccgggggcactaattgcactgtttgtcttctgctctcttgccgcatttgaaaccctgggccctgtcactgttgcattccaacatctaggacaggtcattacctctgcaacccgtgtttctcaattgatgcaacaagaaccggaagtcatgtttcctacatcagggccggaaagttcagctcaagccagtattgatatcaaaaatatcagtttcacttatcctgatcagccaatggccgtcctgaaaaatgtttctctctgtttgaaagcaggggaacatatcgcactgttaggcaaaaccggttgtggtaaatctaccttgctacaattactgacccgggcctgggatattgattcaggctcaatctgtctgaatcagcatgctattactgcttatgacgaatcaactctgcgcagtatgatatcggttgtttcacaacgtgttcatgtgttcagtcatactttacgacagaatttattactggcaaaaccaaatgcaaccgataatgaactagaaactgtgctgaaacaggtaggtttaagcaatctactggaaaccaatgagggcctaaactgctggatgggcgaaggcggtcgtcagttgtcaggcggtgaacagcgccgcttgggaattgccagagcgttactgcactcggcaccactgatgttactggatgaacctacggaagggctcgatgcggatactgaacagcaaattctatctctattgcgtcagcattgtcagcataagtcactgattattgtcacccaccgcctgtacgggcttgaccatatggactgtatttacatcatggatggcggcactattattgaacaagggcagcataatgaattactggctcagcagggtcgttattatcagttttatcagcggcaacatcagattcgtcttgaaccggggcagtagcacatgatgccaataattcaattgaatgctgattcatatgatttccctcacccgaaagaagcattaacggagcctaacggcttactggcagtcgggggagatttatccgctaagcgattaaatgcagcctaccatcaaggtatttttccctggtttttacccagtgaaatgccactttggtggtcccccgatccacgtgcggtaatcattccgggtgaattgcatatcggccgaaccctacgccggtttctgcgcaataccccataccatattacggtgaatcatgcttttgaacaggtggtccatttctgcgctcaacggcaggaaggaacatggataggcaaagatatccaacaaggctataaaaaattatatcagacaggacaagcacattcagtagaagtctggcacaatgagcggattgttggtggtttgtacggtgtcagcgttggcacactattctgcggtgagtctatgttcagcagaatggagaatgcatccaaatgtgcgttcattgccttctatcaccattttctgcgacacggtggtgaattactggactgccaagtgcttaaccatcacacagcttcactgggagcaaaagagatccccagagaagaatttattcagtatctttatcaattcagaaatcggtcattaaaagctggttgctggttacaacaagtactggaattataatcaacatttgaccgattcatgttgctgataacataaatatcactatgcactatttgcaaaatagcgggttaaaatacaacattcctttacataatgagggtttttcggcattatcttgcccgttaaaaacgatggttattaaacttagaggattagatggccaaagaagacaatattgaaatgcaaggtactgtgctagacacactaccaaacactatgttccgcgttgaattagaaaacgggcacgtagtcactgctcacatttcaggtaaaatgcgtaaaaactatattcgcatcctgacaggcgacaaggttacagttgagctgaccccatatgacctgagcaaaggccgtatcgtcttccgtagccgctgattcattaccgtttttaggtattacaccacaggtagcaactttgtattttacaactttgtatcttacaactttgtattcacctgtggtgtcgctcttctattagtgcactacatcttccggtttctgcttataagcattgctgaaatcgtaggtcagtatgcgttttgccttatccaggccaatactcaccgagccaccgtgaactaatgagccgaataggagttcatttgccaacggttttttcaagctatcctgaatgacccgcgccattgggcgagcacccattgctttatcatagcctttatcacatagccattgacgagcatccgcactgacctccagcgaaacgcctttttcatccaattgtgcttgcaaggcgacaatgaacttatcaactacctgctgaatgacttcaatagaaagcgtattaaaccagatgataccatcaagacggttacggaattccggtgtaaacactttcttaatttcttccattgcatcggagctgttatcctgctgcttaaatccaatggatttgcgttgtgtttcacgtacccccgcattcgttgtcatgactaaaatgacgttacgaaaatccgctttgcgcccgttgttatcagtcagcgtaccgttatccatgacttgcaataacaggttaaatacatctggatgtgctttttcaatctcatcaagcagcaatacggaatgaggatgtttaatcaccgcatccgtaagcaatcctccttgatcaaaaccaacatatcccggtggtgcaccaattaaacgacttactgtgtggcgctccatatattctgacatatcaaaacgcaataatttgatattcaacaccttagcaagctgtacggtgacttccgttttccctacgcctgtcggacctgcaagtaggaaagaacccaccggtttattatcctgccccaaccctgcacgactcatcttaatggcttcggtcaatgccgcaatcgcgctatcttgaccgaataccaacattttcagccgctcatccaatgttcttagaacatctttatcactggcagaaacggttttttcaggaatccgggcaatccgggcaacgacgaattcaatatccgacacattaatcgtttttttacggcgactaatcggcaccagacgggtacgcgccccagcttcatcaatcacatcgatcgccttatccggtaagtggcgatcagtaatgtatttcaccgataaatcaaccgcagcacggatagctttcgtggtataacgtacatcatggtgcgcctcatattttggccgcaaccctctaataatctgtaccgtctcttcgggtgaaggctcaacaatatcaatcttctgaaaacgacgcgctaacgcccgatctttttcaaaaatattactgaattcatgataggtcgtagaaccaatcactctgatacgtccactggataacaatggcttaatcagattagccgcatcgacctgcccccctgacgcagcccccgcaccgataatggtatggatttcatctataaatagaatactttttctatcctgctcaagggtttttaacaatgctttgaagcgcttctcaaaatcgccacgatatttagttcccgctagcaatgaaccaatatccagcgaataaatcgtacaatcagccatcacttccggtacatctttttgcacaatccgccacgccagcccttctgcaatggctgtcttaccaacccccgactctccgaccaacaatgggttattttttcggcggcgacacaatacctgaattgttctttctaactcatcctggcggccaatcaatggatcaatctgtcctctttgagcgagttgattaaggttagttgtaaaattttccaaccgatcctctcctgtaagctgctcttctgctgattgcgtgcccgtctcctgatgatccgattccgagtcctctttttgagttccgtgagaaatgaaattaaccacgtccagacgactcacatcatgtttacgcagcaaataagccgcttgagactcctgttcgctaaagatagccaccagcacattagcaccagaaacctctgaacgcccagaggattgaacatgaaataccgcgcgctgaagaacacgttggaagctcaacgttggctgagtctcccgctcatcattttcaggtaacaacggtgtcgtttgtgaaataaaattctccagctccttacgcaattgagccagattgaccttgcaggcttccaatgcttcacgcgctgatgaattgcttaacaacgccagcaataggtgctccacggtcataaactcgtgtctgttatcccgtgctttagcaaaggcaatattaagactaagttcaagctcttggttgagcataagcacctccccctaaaaatcagtatacctggtcagactttttccagcgtacaaagtaatggatgcccatactccttggcatacatatttacctgggctgctttagtttctgccacctcagcagtataaaccccacaaacagccttcccttgataatggacatccaacattaattgcgttgcccgttcaatatcataagaaaagaactttcgtaatacgtcaactacaaactccatcggagtgtaatcatcattgttaagaatgacctgatacattgacggcggctgcaatttttgctgtcgctcatccttaacagattccttacttttcaaactgttatgatactcgttcattattttcccaacggattaatctctaaaaccagccactgccagcaaataaattatgttgccacttatcttatcattatctgggcaactccttttaccacagactattcccctatgaaaactcagcataaaagtgcatgaacgaaactcatatcgttatctatatcaaactttagtcattcaaaacaaccagacatttgttctgtgcttgacgagaatttgatttttactacagtatgttttgtgaacaaacatagataatgtcactgtttacatgtgattgtttacgactgttatattaatggctcatctcaaccgaaatcattaaacgagggatgtagaagtatggagacaggtactggtaagtggttcaataatgctaagggttttgggtttatttgcccggcaagcggcggagaaaaaatattcgctcattactcaaccattcagatggacggttaccggacgctgaaagcgggccaaaaggtgaatttcagcgttcacctaggaccaaagggaaatcatgccagtattattgttcctcttgaaaacgaacccaaaggctaaatagcctggcctgtgggtcataaccaagtattattttcatacgccgcaggcaattacctgcggcgtcatcttatttccgcttattctcttgccaacgcttcgattggatcaagacgagcagcattacgggccggtagaaacccaaatatcaccccaattgcggtagaacaggcgaacgcactgagtaatgcaatgggctggaaaacaaaatgccaaccgggtagtgccagttgagcaataaatgcaatcgtataagacaacccaatgcctaaaacaccgccaaccagacaaactaagatagcttctatcaaaaactgttgcctcacatcactggttctggcccctaccgccatacggataccgatttctcttgtacgttcagtcaccgaaactaacataatattcatgacgccaataccgccaactatcagtgaaattactgccaccatcgtcaaaaacagttgtaaagtatgggccgtcttttccgcagcttttaccaacatgtccacgttatcggtgaaaatatcctttttgccgtggcgtaaagtcagcaactgaacaatcatcttttctgcatccttagagttataatcatcctttactctaacagtaattgagtccagataacttcggttcatcagacggctggtcattgtgctataaggcaaccagatatgcagtaatttgctattaccaaatgcagattctctgttagctatcacccccacaatcgtggccggcatattacccaccaggatcacctccccaatcacatttttctgatgaggaaacagcttacgctgggtatttttatcaataaccacaacttgcccctgacggcgtatcatatccaatgagaaccctatcccttgggcaaaacgcagagcataaacctgaaaatattcatcacccacaccagtcactttcgaagagacatcaatgttccctttgcgaagacgcatttgaccctcaatttcaggagaaacagccagaatatagggctgcactttaatcgcatctgcatccgctattttcaacgcctgcttactgaccggatcatcaatgccgaaatcttctcccggataaatatcaatggtgttcgtggcaatctctttaatatcggataacaccgatgccctagccgcatctccgataaccaaaatagtcacaacagaagcaataccaataataatccccaacatggtcagtaaggtacgcatcttgttgacaaccattgcccgccatgccatgaataaagcttcattaaaccgcccaaagatctggcgtatcgacgatatttttgatgttaacgacggagtttgagtgatttttctactcacttgcgtaccagagtcactcataatgtgaccatccttgatctcaataattcgttgtgcctgcgccgcaattttcggatcatgagtgacaataatgacggtatgcccctgttcacacagttgtttgagaatagccatcacctcttcgccggagtggctatccaacgccccagttggttcatcagccaaaatgacctgaccaccattcatcaatgccctggcgatactgactctctgctgctgtccaccagaaagttgccctggctgatagtagattcgatcttcaagccctaaacgaccaagcaactctattgctctctggcgacgtgctgctttagcggctcccgcgtaaatagcgggaatttccacattctgttccgcggttaaatgagtcagcaaatgataacgctgaaaaataaagccaaaatgttcccgtctcagcgctgctaattcatcattattcagttcagcaacattctgtcccgcgacccggtattcaccgttactgggttgatcaagacaaccaagaatattcatcagtgtcgatttacccgagcctgacgcaccaataatcgcgaccatctctcccgcgtaaatagacaaggtgacatcatccagtacttttatctgttgctccccagcgggatagctgcgctctatacctttcagctcaagtaacgcattcattactcatcccctgcttcactatgaccggtaatcacctgctcatgctctttcagaccagacagaatttgtatatttacatcattgcgtacaccaacagtcacttcccgtttctcttctttacccccattcaggatatccacctcatagcgagtcggtgtaatctgtttacccaaagcagaaagcgggatcattaatgtgtcacgataggaatcgagttgaattttcacctgcgcagtcatttgcaaacgcaaaagttgctggggattagccacctcaaagcgcgcatagaagaaaatcgcatcattaatcttttctggcgtcggcaaaatatccttcaacacaccaggaaaatttttatccggtgcgcctaatacggtaaaagaggccttctgacccggtttcaggtaaataacatccgcctccgaaacttccgcttttaccaacatcgtgccaagatcagctaatgtcagaatggtcggggcttcctgtgccgcaatgactgtttgcccctgaagcgttttaatattgacaacaatgccatccattggtgcggtaatccgggtgtattgcaaattagtctgagcagtatcaaggcttgcttgatttttactgatttgtgccagcaaattctctatcttcgctcttttcacttcaacgtctgttttaacctgatccaattcctggagagagaccgcctgcacttttgccagattgttctgacgctttaatgtaagctgtgctaatttcaattgtgccttggcttctatcagatcagcgttgagttctttgatcgtagcttcaacttcttttacttggttttgtgcaggcttaggatcaatcaaagccagtagctggccctctaccaccttatcgcccacttcaacatgcaaattctgcaactgaccactcacctgtgcaccaacatccactttcctgaccgcatccagtttccccgttgccaatacatttttttccaaatcacctttaatgacagggactgtctgatatttaattgtttctggcccacgcagaaaatgacccagaaccaatgtgataactgtcacaatagttaacaacacaatccatcgacgtttcgaacgaataaaattcatttaaatatcaccatattaagcattagattcagagaaacggtaaaaactgattttcttgcaatactttgaaaaccgaggatttccactcattccattccagatagatgccgttctttttacgttttatacccgttgcaattcattaataacatactcatcttaagaataaaaaaattctttgagcaacaacatatttcactctatcctggctattctcttaatgtaaaaaaattgttatcttttatttttatactctttacaatcgatttttatactaaatttggataaaaagacgttaatcgttttaaaggatgttaattatgtactctgggctactgatcattcttttgccgttaacgctaggctatcttacccatttaaataataagacactgttaagtgctgttcatcaccttcttaacgcaatggtctatatcatcctgtttttaatgggaattagcctggctttgttggacgatttaggccgtaacctcttctctatctttcaatatgcgataacattttttttatgtatttttacagctaatatgctagcgttattcctgcttgaaaaacatgatccttgggttgttagtccgcataaacaggacaaacccccttcccgtttacatatgatttttgaatcactgaaattatgtggtgtactgattttaggtttcctatttgggctcactggctggtcatggttgcacttctccaatcatgccagtgaaattgctttaatcgttttattgttactcgtcggtattcaattacgtaacaatggtatgagcctgaaacagatattgctaaaccgccgcggtaccattattgcaattgtcattgctgtcagtgcgcttaccggaggtgcaattgccgcacttattcttgggctgccagtgaaaacaggtttagcattggcttccggttacggttggtattccctttctggcatcttactttctgatgcttacggaccagtcatcggcagtgctgcattctttaatgacctggctcgcgaactggcggcaattatgctaattccggttctaatcaatcgatatcgctcaagcgctctaggattaagtggtgccacttcgatggatttcaccttgccaatattacaacggtgcggtggcgtcagtattgttccagcagcgatagttcacggtttcatcctgagtttgctcgcacctttactgatcgcattctttacttaaccagaatttgagccacaataatacttgatgtcataaataacagttcgggcgcttcatggtcataagtcgtcaacagtagttacttatcctaatgctgaccatttgtgacctattcatcttttcgcagtatgacaatagaataaataagcttttattgacaaattgcactaaggagagaatagagcgcgttaatcagacatgtaattgaaatatcaattaataatattctgtgcataagatattgcataattatactaacgggtttagcatcggactaaatcactgactattcagaattaaagcatgagtattcaattaaaaagcatcgattgctattacggtgtccatcaggcactgtttgatattaatcttgaatgttcttcaggggaaacgatggttttgctcgggccaagtggtgcaggtaaaagtacattgttacgagtactaaacctgctagaaatacctcgctccggccagttgcatattgctaatcatcaattcgatttcgaacaaacaccgggaacaaaggagattcgttctctacgccagaacgtaggtatggtttttcagcaatatcacttgtggccacaccttactgttatggataacctgatcgaagcgccttgtcgcgtactgggtttatccaagcaacaagcgcagaaaaaagcggataagctcctttcccgtttgcgcttagatgattttgctggccgcttcccacaacatttatctggagggcaacagcaacgggttgctattgcacgagcattaatgatggaaccacaagttttattatttgatgaaccaacagcagcgctggacccagaaattacagcacaggttgtcaatatcatccatgaattatccgctacgggtattacacagattatcgttacccatgaagtggaaatcgcccgtaaggccgcaagccgtgtcgtatatatggaaaacggccacattatagaacaaggtgacatcagccattttacgcaaccacaaaccaaagcctttgctaattatctatcacactaactattaataggatatagcgatgaaaaaactactttttgcagccctcttaggcaccgtagctttatctgcaaccgccacggaaaaagagatcattcgttttgccacagaagccacttaccctccgtttgagttcatcgatgcaaataataaaattcagggttttgatgtcgatttggccaatgccatctgtgagaaaattaatgcaacatgtaccttcactaaccaatcctttgacagcttaatccccagtctgaaattccgtcgcttcgacgctttagccgcagggattgatatcacccctgaacgccaaaagcaggttgattttactaacacttattacgataactccgcggtttttatctccgttaaaggcaaagtctccagcaccgcagagctgaaaggcaaacttgtgggtatccagaatggtacaactcaccagaagtatctgatggaacaacgaaaagagattaaaaccgttccttatgacagctatcaaaatgcaattctggatctgaaaaatggccgtctggatgccgttttcggtgacactgccgttgttaacgagtggctgaaaaagaatgaaaacttaagtaccgtaggtaacaaagtcactgacaaaaattactttggcatcggcttaggtattgcagtgcgtaaaggtaacaaagatctacaagataagctgaataaagcactcgctgacatcaaacgagatggcacttatgacatcatctatgaaaaatggtttaaataagtagccgaatctccatgaatgaattccaatctctaacaagcgccgccggcatcaccgtcggccttgccgtgtctgcattagtgcttggtctgattttagcgatgctatttgctgcctgggaatcagcccgttggaaacccttcgccatacttggcacctgttgggtcactctgttcagaggattgccagaaattttggtcgtgctgttcgtttacttcggtgcatcacaacttctcatgacactggctgatggctttgacattaatcttatcttctggcactccagaattcagatagatatccaagacttttatgtcagcccattcctttgtggtgtcattgcactttccctactctactctgcctatgcatcccagacactccgtggtgcgataaaagccattccgattggccaatgggaagccggtcaagcattaggtcttggtcgcgctgaaatatttttccgcctgatcatgcctcaaatgtggcgacatgctctaccagggctcggtaaccaatggttagttttgttgaaagataccgcactggtatcgcttatcagtgtgaatgatctcatgcagcaaaccaaaagcattgccacacgcactcaggaaccctttacctggtatatgattgtggcgcttatctatctggctatcactctgatcagtcagtttattctaaagaaaattgagatgcataccactcgctttgatcggagtgctccctgatgcttgagtatattcaacaaattttacccggtctgcaaaccagtctaagcctgaccgtcacagcgctccttgctgctttcatgatgtctgttctgttcactatggttctgaccatgaaattgccggtactgacacaactggtaaaagcctacattaccctgtttaccggtacacctttgctcgtgcaattctttctcatttattacgggcctgggcagtttccagccataaaagcgtacccgtggctttggcaattactgtctgagccttggctgtgcgcaatggtaacgctggcgcttaacagtgcggcatactcgactctgctattctatggcgcagtaaaagctattcctgcgggtcaatggcaatcttgtcaggcattaggcatgtctaaagcacaatctatgcagatcttgctaccctatgcttttaaacgggcgttatcttcctattccaacgaagttgtattgattttcaagagtacttctctcgcaagtacgattactttgctggaagtaatgggatacagtcagcttctatttggccgcaattatgatgtgatggcttttatagccgcaggggtgatttatctatgtgttaacggtatcctgactttgctgatgcggataattgaacgccgtgcacttgcttttgagcgccataactaaacgggatagggcgctctcttttggagccccatccccacacatccttccgttattcagttatgatttaataccaataacgttaaaacttcataatgttcggtatgaggaaacatatcaaacaactgtgtcttttctacacgatagttagcgagtgcagcaatgtcttttgccattgtctgagcattacagcttgaataaagaatataatccggcaccattttactgagataatcgcacaacaccttaccaattccccgacgaggcggattgaccaaaaccaattgcggaatttgatcttttgctacagcaaaatgagttgaatccaaagcttgaaactcgatgttttccaaacccagtgttttcgccgaatcgcgagcacaatcaatggcttctgagctgatttcaatgccggttaaacaggtatttttatctgcgcaatgcagaccaaagcccccaacaccgcagaatagatcccacatgctactgattttcagttcacgaacccaacgccctgctgttgcatacaattcagaagccattttcgggttagtctggaaaaagctatgtggacgaatgtaaaggggaatgccattgaactgctctttaaacgccttttgttcagtaaacagaatctctttttccccctccaaaatcgccatatggattggctgaatattggcagagatcaccgtaagctgtggcaattgctcatgcaaccggggtaaagcacgctccagttgagcaatttttgtttcagaacgcagtacaaaacgtaacatcatttcaccgctatgacggctttctgtcagcaacaaatatttcagttcacctcgtttacgagcaacgttatacggtgtcaacccggcacacgcaatgaacgatttaacaacatcgaatacaggctgaaaatgcgctggatagaggggacaatgacacagatcaaccgccgtgccatcacgatgcaacatgcctagcaatgggcgttctacactgccactgacgaccattttagctttattacgaaaggcatcttgttggctggcaatcggaggtaaccattgcttcacaatagcttgaggtaataactgctttaaattctgctgcttatcttctaactgctgagaatagggtttttcgagccactgacaagagtgacagtgccccgcagaataatgcgcacattgcattgttggatgaccgtgttgaaaatattagtgcaaagtaaaagtcggtgccttaacaggagcttgtgactcctcttcctcttcaatgtcaccctcgatttcgatatcacgattaatatacaacaagttattactgtgaatttcaaaaatcacacccgcaatctgctcttcgctttgttgcaagaaatgagaaaactgggaaaaagtcagcccggctgaaacaaggaaagattgacacaccaccaatttcggtaagttttcatcttgaatatcaagaaaagccttgattgtcagcgaactggcattaatctggcttagattagccatcaaaggaataatggcggttggtttaacttcagccaacgcagaaaacaagattacattgtccaacagatcgattttagcatcaaataaaccatcaatattctgcatatgagggagatgcagcgcctggcatgaatcgcactcaaagtaggaaattttgagctgatccaaccactcacgcaatactgataagtcaggaatgacaagtgaactcatctaacaaccccatacaacggaaaatgaaaaagcgctatagcttacgaaataattctttatcgcgctatcaccaataactgataaattatttttacttaccgttatcactaccttctaccttatttttgctctcttttttatgatcaactcccagaaaagagaggccatacactgcacgccaaatgatattaaccgcagcaggaaccaaacaacctatgccgatgaaaatcataacaacatgtgcttctggcgtcattagtaaatctgttaagatgacaatatcattaatagtcaaatatgccaggagcaagcctaaaatgccgacaatttctagcaggataacctgttttggcatatctgccaatgaactcatactgccttgatgacttttcatcgtatcctctcttaacaacctgatgcgacattatactaccggaaacactgttaccaaaattggtatgatgaattaaaacaaaaggtaatttctgcttttttttaccgatcagtacaggcatagtagccatcaaataagcatgagtaacacatcacaccgcattattttaatataaccaagaggaatttatatgtttactgtgattttcggtcgtcctggctgcccgtactgtgtccgcgcgaaagagctggcggaacgactgaaagagcagcgtgatgactttgacttccgttatgttgatattcacgcagaaggtatcactaaagctgatctggaaaaaacagttggtaaaccggtagaaactgtcccgcaaatttttgttgatgagaaacatatcggtggctgcactgacttcgaagcgtacgtaaaagaacaccaattgctacaataatcgaacttcaatcgaacttctcgttttgctttcgttgcggtgaaaaccgcgattgattattaatcacagtggactcggttgatttgtgcaaaaaatgttattttcatcaaattgaaaaaaatctgtttttttttcttatcacgaagaacttttttgccaaaccgcagtctgaattaatgccactgcttttctttgatatccccatattgaggaacccgatagtcaatccattttggttcgagactatcgggtttttttattgtctgaagagtataccgttcacaaacacataaccgattctacagatgatcaacctatcaaccaccggtactatcaacacgctgatcttaagattattataatatatatcaatgtgttatttattttttgtccagatgactgcctgatgtttccttgacggaaagataaaccaaaaataaataacaccaataattaagacaattacgctttactctcaggtcagccaactttactctcttgcgtccgactatcgtgatgtacataagtgactatatgtgaggcccgatttgttagaacaaataaatcatgatctgtttacctttttcaatgctacgcctgaatcatcaccagccatgattgcaatggcgacgttcattgcaaaatacctggttcttattttccctctaatattggctagtttctggttctggggttcagagcgtactcgcccttatcatcgggttatcgtcagtaaaaccaccattgccttctgttttgctatgctaacctcatactgtatcggtttactctgccctcacgaccgcccttttgcagaaggcttcggttataactttcttcctcacgcgccaacaacctcattcccaagtcatcatggaacaaccgtcttcactttcgctttatcctttttattctggcacaggatttggccgggcttatgtatgatggcaattgcactggcaattgcatgggccagagtctatttaggcgttcactggccgatggatatggtcggagcatttatcgtcagcctaatgggatgcacttttgcgcaaataatatggagcctgtttggtgaacgtttacaaaaaagattgaacagtctgtaccaacattgctgcgcttttcctatccgtaaaggctggataaaaagttagcaacataaatgcaacttagtgacttgagataaacgaacgctatctcaaccaaagtctttttattagaaattattgactaattttacatgccaaaatggatatgagttaaccagcagggtaatatcctgtaccctatctagcatttatttgcgcttaaattcaactcaacgattttcatataaatcaataaatctatataaatcactatgtaaatagatatataacgaaagagattattaaaatttgatcaaagaatggctagcacatctttcattcatattattgatgctattaatctattattctggttttatctatatctttcacaaagatacaagtattacataagagatatctattttaaaatctggtaaaaaattgatatttatcaatttattaaccatttactctatttgccattttcattcattaatatgtaaataaatagacaggaaataacaaaaacataagaaaataataagagttgaataatgggcaaattgaggttataatttgacctcattgaaatacgcaatatttagacaacaattacactaaatctcgtaacatgatgacttttcgggatgtattccgcatttgagactatgatcacggtactattcactaaaaatcgctatcttgccgctatcaaaagtctggtcttaaaatttccagactttctttcaaaaaagaaagtaaagcgaaaattttggcttgttaatttaaagtccaattttcgaccaagatgttaatgtggtaataaaaacgtttaaataaccaccagagatatttagaaaatttattttttataaagaaagagttaggccacatgtatttgcatttattgcatacttgcggcattgtaatttcattttttaatttaccgcgttattctcggagataactatggatatgactcaaacaggtacgatcgcatcgcaggcgaccagcccaagcgattataaaacctggcgtaaatcagatacagtatggatgcttggcttatacggtactgcgattggtgccggtgtattattcttacccatcaatgctggtattggtggcctactacctcttttggtaatggcgctactggctttcccaatgactttcttcgcccaccgcgggatgtgtcgtttcgttctatcaggtaaaaaccctggcgaagatattaccgaagtcgtagaagaacactttggcaacctggcaggtaaacttattactctgctctacttcttcgctatctacccgattctcttagtttacagcgttgctattaccaacaccgtagacagctttattgttcaccaattacacctgccatcacctcctcgtgctctgctggctctgatcctaattactggtgtaatgaccatcatccgttttggtgaacaggctattgttaaggcaatgagcgtgctggtattcccatttgttgccgttttgatgctactggcgttttatctgatccctaactggaataccgcaatcttcgaaaacatcagcgtttctgcatcgagtgcaagtcatgggctgctcattactctatggctagcgatcccagtaatggtgttctccttcaaccactcgccaattatctcggcatttgcggtggcaaaacgtggagaatatggtgagcatgctgagaaaaaatgctcccgcattctagcttacgcccatatcatgatggttgtaaccgtgatgttcttcgtattcagctgcgtattaagcctgtctccagaaaatctggcagaagccaaagcacaaaatatttctattctgtcttacctggctaaccactttaatacaccagtggttgcctacatcgctccgtttattgcattcatagcaattaccaaatctttccttggccattatctgggtgcacgtgaaggttttaatggtattgtggttaagacattgcgtgaccaaggtaaaactattgagcctaaaaagctgaatcgtatcactaccattttcatgttagtaacgacttggattgtcgctactctgaacccaagtattttggaaatgatcgaaagattaggtggtcctattatcgcaatgttgttgttcattatgccaatgtatgcaatcagcaaagttcctgcaatgcgcaaatatagcggcaagctgagtaatctgtttgtcgtctttatgggattagttgctatctctgctgtcctctactcactgtttgcataataaacatttggttgctgttctcttcaagcgggcagcaaccgaataacgacatgagctagctagcggaaaaatttaaactacactacccacttcacccaattcccctgctgttcatcatattgccacaaatcgtcttcgttaaaatatccacgttcgtctattggtaccccttgctgttcttcttcgtcccattgttgccgcaacttatctgtcaggatataaggcgtcttggtcacaatctctccagtaaaaggaaacctattgccagcctcttcaagacggataaacctggcatcggtagaaatattagagataactaccgcctcagttgctgaaggaaagagaatataaccgttaatcaacgggaaatatcgcggcaaacccggcttatacggtgatggaatgatatcaacggcgttccacataagaagataatctaacccctcatcgttattaggccccattggataaccttggtaaaaataacgattatgaattgaatagttacccgtcaatacatatgcaatataaaaatagtaactaatcagatctacttcttctgttctaaacgtaccgaatattgaatgtaaaggaaatgtccccataccaccaaggagaccaagaacctcatactgttcatcatgaccatattgatcaatatatctcccggtcttgattttcgacacctgcatatctgtcaaaatgttatctcgtccattacttggattgaatctatatcgaccataaagaaagtgcagactatcctcataaatgtaagtaaattgctcctgattaagcttatggagaggattaggtttatccgcccaccgtttgtcatcacctaaattattacgatttccaaaacggatagaaagcgctaacggatcaagatatgacatataaccaccttttcatcatagaatagtgaattctaattattttatttctaataacattcttttattaacaaatataaaattactccaatacaatttatccttaatattgaaatagttatttatatggctattttatttattattgagttttttaaagaatagaccaatacttcataaataaaagttttttttataaaaaacacatacaacatctcatttgcattaatatttatataaatttcagataaataaattaaccatatttatttacaataattaaaaatataatttaaatttttaattatcaaactaatcattcaaaataaataaattacaaataacattttaatttaatataattatatgaaatacaaaaaattccggttattttatatttatcacattaacaatttattttctattttttggcaatatgactctacttatcaattaattacatatttttttcaaatttatttgacaacttataaatggcacctatagttatatgtgttagagaaaatgttatatgccaattaaaaacgttaactgtcctatatttttagcgcaaaaaaaatttcttatgtagattgcttttatagtagaagtaccaaccaccttatatttctcaaacggacgattttccgttatttattctgagataatataggcttatttatcaattaattacattatattttggagtttacattatgattaatgacatgcatccttctttaattaaagataaagatatagtagatgacgtaatgctacgtagctgtaaaatcattgcaatgaaagttatgccagacaaagttatgcaagttatggtgactgtattaatgcatgatggcgtatgtgaagaaatgcttttgaaatggaatctgctagacaatagaggcatggcgatttataaagttctgatggaagcgctttgcgctaagaaagatgtgaaaattagcaccgtaggaaaagtaggtcctctcggctgcgattacattaattgcgtagaaatctctatgtaaaataattgattgttgaaatgcttgagccaaataatagactcctaatagagactcaatctgattaaagcgatctcattgatcgcaaaatacagtactgttgtgataggaatttggcacaacatttctctggtataatgaagctgacttttatataccctatggatttcaagatgcatcgcggcggcaagggagtgaatccccgggagcatagataactatgtgaccggggtgagcgagtgcagccaacaaagaggcaacttgaaggataacgggtataacggcacattctaccctatctaaggcagagcgtaatattaacgctctgcctgccataactacatttaataaaaaaaacagaaaatcataaaaataatataaaacaaactttcaataaattaaaatcaattaaccaggttatctatttcacataaaaatatcaataaattattatcaaaattcaatttcactcaaaaaatttcttttaggaattatttttaataatagcacataccatccgctcaatctttaaaaacagggtagaacaacgcctctttattgcacacagtgaatacttaacaacatatgtaattacatcaataatatttccatattgtaattattaattaaatatcatacacccaggtattattaaatctaaaatagatttaaataaattaatttcagagattgcagtcatatatctccatgcaagatactataggataagaataatttcataatgttttatttaaatatcaactagaaaattaaaatttaaatcattcaccacatactgctagtacgcttcaattcctgccgcccattccgtacccatactctattaataagaatatcctgcataaataatacttactggaacagattgttaatttctcaatttcaacaacaggaaataaatatcaatattattttttgattagagtgatacatttgattattataaccatttagaggaaatatattattggcgactttttaacagcatcaataattatataatatagataaacttttaatatagattacaattaccaattaccttatatttcttcggcggacaaatgactgctccgtacattttagtaaagaattctatttttcaattacgttaaattaaaaggttaacacgatgaactatacaaatccttcttctaatgaagtggtaacagaaaataaacctgaacagacttctccaaaccctaattactattttgcggttggtacagtaacttcagttcaggctgcacctgatcaaaaccaattgcaagtgactgtcactatgcaattccctaacggcaaatttaactatctgttatggtggaatgctcaggactacagaggtgcagcactgtatcatcttcttctgagcgcttgcagtagtaacaaacgtgtaaatataacttcttcatcagcggtttctcctggtggttacaattatatctacaacgcaacattattggcttcttaagataaagtcataaattgttaaatagctccacctaattccttattgttaaaatataaattgggtatagcatttatctggtagaataaagctaatgttgagtaaaagctaaaaacattttctaccatatactcccctctctaggtagaaccttaaccacagggttctgcctgttctcgcaacaccgttttaaattcacggtaattaataaataacaccttatttcaataatgctattttaatgtcatcaatctatatttaatgactttaaacattatttcaaatagaaaataaaaacctacaaaaataataaaaagacaataatagccctaaaattaaccacaataaatttattgatcatacatttaacacctcaataacaacgtattaaaacaattgtattaaatatatttttgaacgttactattttaatttatcaaaaattatcctcctatctaatattacctgtaaaataataaaaaacccaattaaagcccattttcttgacaaatatcaataacgcttactactatttttaatacttgaatatctatttctctcactcacttctcttcataataggtgataaaatgtcagaagaaagccaacgtattaaaaagccatcctcaggttatgcaacagatcatttctacgatggagcatggcatagggcggtcaaatttgttgagggcagtgttgaattttttgatgtttacgatgttatctttgaggggattacttaccaatccccaccaatcttagtttctgagaacctcattattgttcccatagcaaaagatgaagttgcctggaacagtaaaatagaaatatatggcgctatcggcactggggaaagtgaaaaaattttttctgacggtgatgccgtccgaccttttgccggtgaacttgatgtttcaaatcctcaggaacctcttgttattttcggcggaggcaatgttagtcgttttcccaattacacagccaatgtcaatggggttgaatatggtggtttaattatagatccagaaaagaattcaatatccttattacgctccatcgaagatggaaaactaatggtatttggcaaaactgaaactggcaaaaatgtcattgtttttgaaatagaaactgaaggtgaaaataaaccacttaacggatgggtagagtttcatgacgtagcaacctgtattctattcagaaatggcgatttaacaggattcgctactagctatgaactccgatatgaaggaacatcaacccgcaactatcgaggtttatcaccgacgcatattcgttacgaaaatatcggccatcatgttaaaactgaggtcgaattatgggcttactggcaagataaacctgatggtgtcttgttattcaaaggccggtacaacggatctgttgtaaaaaatagcaaatgttgctctttagatgaaaaaaaataggtatatacccaatggatttcaagatgcatcgcgacggcaagggagcgaatccccgggagcatagataacgatgtgaccggggtgagtgagtgcagccaacaaagaggcaacttgaaggataacgggtataaagcgtgcgcggcaaaatgccgcgccctaaatcaaaaaaatataacgccacccaacctaccacataaaccttatattgatgtcaaatcaaccaaaaatcgccttaaaccaaccactcactttcatcacaatcaaatcccaaatacggctaaaaaagctaccttcctctaccgcctctttaaccaccaaagggcgttgttcaattaccttatcccctaattggaaattaatcacaccaacaacctgatttttcgtcaaaggcgctgttaatggagtttgatttaatgtgtaactggctttcagattttttaactgcccacgaggaatggtgatcgcagcatctttttccacgccaagagcaacatctgagcgcccgccataccaaaccttttgcgaaacaaacggctcgctagctttaatgggcgtcactgtttcataaaaacggagtccccatgcaagtaatttttcactttcaacgaaacgaatccgatcacttggtgctcctagcacaacagaaatcagccgcatgggtccctctgtcgctgaagcaactaagttataaccggcaccgctggtatatcctgttttcacaccatcgacattcatattcttattccacaacaatcggttacggttaggctgttggattttattaaaggtgaatgttttctctttatgcagagcatactcatcaggaacatcacggatcatggcctgactcaataccgccatatcacgagcagtactgaattggccctcagcatccaatccatgaaccgtacgaaaatgggtgttagtcaacccaagtgcttttgcataattattcatcagactaacaaatacatcctgactacccgccacataatcagctaaagcaatgctggcatcattaccagactgaccaacaacaccatgattcagatcaatcacttttaccctgtcaccgggtttaagaaacatgagagaagaacctttcagtatgggatttcccgtcgcccaagcatcttttcccacagtaacaatatcttccggcgtgatttttcccgcttttatcgcctgaccgacaacataactggtcataatttttgtcagactggctggatcaagccgctcatcgggattacctgccgccagaattttaccgctgtcataatccattaacacataagctctcgcatccactggcggaacgacaggttcatccgatgcataaacacgggcacttaccattgatgccactgtcagcaccgcaacaacacattttatcgccatcgccaaatttttcttcatcatcgttcccctttacttaataagaaaaaatgtcaaattcttataccctatggatttcaagatgcatcgcggcggcaagggagcgaatccccgggagcatagataacaatgtgaccggggtgagtgagtgcagccaacaaaggagcaacttgaaaaatgacaggtatattaatataaaatgttgtacgacaagaaaccaacataaataggataaagattgtgctgatcattagttttcatttaatctgatagcggttataccttatggatttcaagatgcatcgcgacggcaagggagtgaatccccgggagcatagataactatgtgaccggggtgaacgagtgcagccaacaaagaggcaacttgaaagatgacgggtatattggtaacaaatagacaattttcttatcatcccgattccaggaaaaactcatgctgaccatttggggccgtaaaaactcttccaatgtaaaaaaagtgctctggtgtctgaaggaactcgatataccgtataatcaagtagatattggcggtaaatttggcaaactggatgccccacaatatctgaaaatgaatccaaatggaaaaatcccttgtttacaagaaggcgattttatcttgtgggaatctaacgcaattgttcgttatcttgcagcaaaatttggtaaagaggtactttatccacaagacctacaggaaagagcaaatgcagataaatggatggattgggttgcttcacatctgtttcctcatatcagacaactcatgataggttttattcgcacacctgaaacagagcgggatcaaaaacaaatagaacaaaccttggctgaaatcgaaaaattgatgaaagtgctcgatgacaccctggcagaacagaaatatctttctggcgataaatttggcatggctgatattgcattaggacccatgatttatccttggcttaatattccaatcaaacgaccatttctgccaaatattgaacgctggtatcagttaatggcagaaagaccagcgttcaaaaaaattgtcatgattgagttaagttgagaaaaatcagctcattggcatccatccaggatcggggtattgatacttaaatcccaactcctgacaaatacggctaccatcaacaattctgcttcccatctgagtctcttctctgaaaaactcaggtggaactaaatcaagctgattactggctttagggtaaaattcagctttggttgggtgaacaggcgcacataaattataaatatgcccaccttcagtcctctgaattaataaattaatggctgaaataacatcatcctgatgaactaaattaaccggctgattccctcctttaactcccttttttcccgccagaaaacgcccggcatgacgaccactgccgaccaaaccggctaaacgcaaaatatcaacagaaatatttggcagtttgtgcaaccaattctctaattcaaccaatgcctgagcagaacgtgtttcagggcaaaaaggcgcatcttcattgagattgcccgcaacaaaaccataaacagaagtagaactggtgaaaataatccttggcacagagtatgagagagcagtatcgacaattaactgaactgccctaacatagttataactgccacccgcagtgtggcttgccggtaaagtgatgatcagcacatcagctaccatcagttgctctaaatcatcaagcgcgcaattgatctgaggttccagttgtaacaaataacattcgataccagacatacgtgctgcctctacaccatctggcgtcgttttgctgccaacaacctgcataccactgcgactcaatgctttggctaatggcatccccaaccaacccagaccgataatggaaacttttttcatcaccaccccttctatgcctgatattactttgattatgcaaacaatccgaacattaagccactgttattattgatactgtatttctcccatagaaaacaatatttcaagtaaaaacaaaatattattacaatataaatttactgttaaaaaaatagattgcttttagtccatcaaatcgtataggttgaatagcaagcaaaaaatttaatctctgttggtcagtgaataaaagcaactggcagcaataacaaataaagagaaaccattatgatccgcattcaatttagccattaccaccatcatcatcctgattagtctttcaggcggttgtgtgctggaagacgtttaacgggtcttccggtggcatgaatgcgataaaaacccccggaaggatccttccgggggtttttttatgtttccgattttaagtggggataaaaatgttagataaatcacgtttacgtatcgcaatgcagaaatcaggccgattaagcgaagattcacaagaattactggctcgctgtggtattaaaattaatctgcaacaacagcgcctaattgcattcgcggaaaatatgccaattgatatcttgcgggtacgtgatgacgatattccagggttggttatggatggcgtcgtcgatctggggattatcggtgaaaatgtgctggaagaggagctattaagccgtcgcgctcaaggagaaaatcctcgttatttcaccttacgccgtctggatttcggtacttgtcacctttcactggccgcgcctctagactacaactataccggcgtcgaatgtttacaaaatgcccgtatcgcaacctcttaccctcacctgctaaaacgttatctcgatcagaaaaaaatcctctttaaatcctgtctgctcaatggctcagttgaagttgctccccgtgccgggttagccgatgccatctgtgatctggtttcaactggcgcaacactggaagcaaatggtctgcgggaagtagaaattatctaccgttccaaagcctgtcttattcaacgtgatggtgaaatgcccgccgataaacagcaattgattgagaaactgttgacccgcattcagggggtgattcaggcccgtgaatccaaatacatcatgttgcacgcaccaagtgcaaaactcgaagaagtgattgctctgctaccaggggcggaacgtccaacgattctaccgctggtgggagatcagaaccgcgttgccatgcatatggtaagcagtgaaacactgttttgggaaacgatggagaaacttaaagcccttggtgccagctccattttagtattgccgattgaaaagatgatggagtaaacgaaaatgactgaccatttcgataccctgatccgttggcaggagtgccatgatgaacagcaaaacgctttactgacacgccctgcaatttcagcttccgtagaaatctcccgtacagtggagcaaattctgcatgcggtgaaagagtatggcgatcacactctgcgtgaattcagccgccgtttcgacaaaacggttattgaaaatatccgtatttcgccggaagagatagccgccgcagaaaacagtctgaataatgacattaaacaggcaatgcagcaggcaatgaataatatccgcgttttccacgaagcgcagaagccgataaagatcgaagtagaaacccaaccaggagtctattgtcaacaagtaacacggcctattgattcggttgggctttatatccccggaggttctgcaccattactttctaccgttttgatgctcggaacacctgctcaaatagcgggctgccataaagttgtactttgttctccaccaccgattgccaatgaaatcctctatgcagccacactgtgtggaattacggaaatattccaaattggtggcgctcaagccattgccgctatggcatttggaacagaatccgtccccaaagtagataagatttttggtccgggtaacgcttatgttaccgaagccaaaagacaagttagtcagcgcgtagatggtgccaccatcgatatgcctgctggcccatcggaactgcttattatcgccgatgcgggagcaaaccccgtctttgtagctgccgatttactctcacaagcagaacatggccctgactcacaagtgatattggttacacctgatgaagcgttagccaaaaaagtgataacggaaatcgaaaaacagcttacccgtcttccccgcaaccagattgccgccaaggcattagcacatagccggattattgtgacaacaagcctgcaacaatgcgtagaaatcagcaaccgctatggcccagagcacctgattatccaaacccgccagccagaacaactggttgaaaaaatcactagcgccggttctgttttcctcggtgactggtcgccagaatctgcgggagattacgcatcaggaaccaatcacgtattaccaacttatggctacacttcaacctattccagccttggtctggcagatttcctaaaacgtatgacaattcaacaactgacgccgcaaggactactgaacctatctcagaccattgaaacactggcgcaagcagaacaactgaccgctcataaaaacgcgctcactttacgtgtggcggcgctgaatattgccggtcaaggggtgaatatgaataacattttcgatgccaatctgttggcacgagaaaatatccgcaaattaacaccttatatgtctgctcgtcgccttggcggcaagggtgatgtttggttgaatgccaacgaatacccactagcccctgatttccaatgcactgagcaaacattaaaccgttatcctgactgccagccagcctcggttatccgccgttatgccgcctatgcaggcttacaacctgagcaagtactagcctgccgtggtgctgatgaatccattgaacttttaatccgcgtattttgtgaacccggacaagatgtagtgctgttttgccctccgacttatggtatgtacagtgtcagcgctgaaacttttggtgtcgaacaaaagaaaattaccgcactggaaaattggcaactggatatcgaagcgatcgaaaataacctcgaccgggtaaaattaatctatatctgtagccctaataacccaacaggaaacgcaataaatcctgattcattgcgtaaaattctggaactaaccgccaatcgtgccattgtcactatcgatgaagcctatattgaattttgcccggaaaatagtatcgcaagctggctaaaaaactatccaaatttagtcattttgcgaaccctctcgaaagcttttgctttagccggtctacgctgtggatttactctcgcatctgtggatatcatcactctattgttaaaagtgattgcaccttacccgctttccacgcctgttgcagatattgcagcacaggcactgacagcagaaaatatcgcaattatgcaaaaacgtgtcgttgagatcagggaaaaccgcaatgacttgcaacaggcgctgaataaattagccatcgtagaaaaagtattccccagtgaaaccaactatatattggtgaaattctatgacgcagaaactgttttcaaaacattatggcatcagggcatcatcctgcgcgaccaacgcaaacagcccggtttagagggttgcctgcggatcaccatcggcagccgtaaagagtgtgagcgagtggttgaagccatcagcgccctttccactgtaaatgaacaaccaaaggagatagcaaactgatgaaccagaaactcctgtttattgatcgggacggtacgctgatcactgaaccgccaacagattttcaagttgatcgtctggataaactggcactggaaaccgaggttattcctgctctgcttgccctgcaaaaatcggggttcaggctgattatgatcactaatcaggatggtcttggcacagatagttttccattagaacaatttgaaccgccacataacctgatgatgcagattttcagttctcaaggcatccattttgatgaagttttaatctgccctcacaagccagaagagaactgtcattgccgtaagccaaaaataaaactggtggaaaaatatctaacagaaggcttgatggataccgcgaacagctatgtgattggtgaccgggaaaccgatctgcaactggccaaaaatatgggcattcaggggttacattatcatccgaaaaaccttggctggttcgctatctgtgaacaactaacccgtcaagaccgtcacgctcatgttcaacgtatcactaaagagacatccatcaacattgacgtttggcttgatcatgaaggtagcagcgatatcaataccggtgtcgggttctttgaccatatgttggatcagattgctacccacggtggtttccgcatgcatgttcaggttaaaggcgatctctgtattgatgatcaccataccgttgaggataccggtctggcattgggggaagcattgaaactggcgttgggagataaacggggcatttgccgttttggttttgtgttgccaatggatgaatgccttgcccgctgtgctctcgatatttctggtcgccctcatctggaatataaagctgaattcaaacaccagcgggtgggtgatctgagcactgaaatgattgagcacttctttcgttcactctcttatgcaatggcctgtacactacatctgaaaacgaaaggcagcaacgatcatcacagagcagaaagcctatttaaagcctttggccgaacactacgtcaggcaattcgggtagaaggcgatacattgccaagttccaaaggggttctgtgatgaaagttgtcattcttgatactggctgcgctaacttgtcatcggtaacttatgccatccgaaaattaggctatcaacctgaaatcagtcaggaaacagcaacgatcctggcagcagataaactacttttacctggtgtcggcactgccagtgccgcaatggatcaattgaaacaacgggaacttataccgttaattaaagtactcagccaacctgtgttaggtatttgccttggcatgcagctattcgctgccaccagcgaagaaagcgataatgttgcaggtaataatgtcaccctactcgaagttatggcttcccccgtccaaaaaatggctacgcatgggcttccattaccacacatgggctggaaccaagttctgccaaaagccgggcacccgctattccgtggtattgaagaccatgcctatttttattttgtccatagctacgcgatcccgctgaatacctacaccattgcgcaaactgaatatggcaatattttcagcagcgcaatcgccaaagataacttcttcggcgtacagtttcaccctgaacgttccggtgctgccggagccagactattaaagaattttctggagatgtaggcacaatgattatacccgcattagatttgatagatggcaaagtagtacggttacatcaaggggattatgctcaacaacgggattatcaacacgatcctttgtcccactttcaacaatatgaacaacagggagcaaaattgctccatctggtcgacctgaccggcgctaaagatccatccgcccgccagatccctttactgcgcaaattacttgcagcagtttctatacctgttcaggtcggcggcggcatccgtacagaagaagatgtgaaaacattgcttgatgcgggtgccaaccggatagtgattggctctatcgccataaaacaaccggcactcgttacccaatggtttaaacgttatggtgccgaaaatattgtgctggcgctggatgttcgtatcaatgatacaggcatgaaacaggttgccatcaatggctggcaggagaattcctccgtcactctggaacaggttattgagcaatatctgccttgcgggttgaaatatgtactgtgtacagatatctcccgcgatggcacgctaactggttcaaatgtcgaattatatcgggcaatttgccaatactatccacaaatcgtatttcaggcttcggggggcatcggcacgttaaatgatatcgcttctctgcctaccagcggtgtagccggggttattattggtcgtgcattacttgatgagaaatttaccctgaaggaggcaattcaatgctggcaaaacgcataattccttgccttgatgttcgtgacgggcaagtggttaaaggcattcagtttcgtcatcacgaaattatcggcgatattgtgccacttgcccaacgttatgcaacagaaggtgcagatgaactggttttctacgatatcactgcctcatctgatggacgggtagtcgataaaagttggatcaccaaagttgcggaggtgattgatattcccttttgtgtcgctggtggtattaaaactgtcgaagatgcagggcaaatcctttcatttggggcagataaaatctctatcaactcccctgcactgactgatccaaccttaattactcgtttggccgatcgttatggtgttcaatgcattgtcgtagggattgacacctggtttgatgaaagtacaggtcgctatcaagtttatcagtttaccggcgacgaaaaacgcacaaaggccactcaatggcaaaccctcaattgggtaaaagaagcgcaacaccgtggtgcaggtgaaatcgtactcaatatgatgaatcaggatggtgtccgcaatggctacgatctgactcaactaaaacaggtgcgtgacgtttgtcatgttcctctcattgcctctggtggtgcaggcgcaccagaacactttcttgatgcctttaaacaggcaaatgtcgatggtgcactcgctgcatctgtattccataaacacattattaatatctgtgaattaaaacagtacctttcacaacaaggcgtggagataagaacttgctaaccgcacaacaaatcgaaaaactggattgggaaaaagtcgcttatatgatgccggttattgtgcaacatgctatatccggcgatgtcctcatgatgggctatatgaataaagaagcactgaatattactatcagttcaggcaaaatcactttcttttcccgcagtaaacaacgtctatggaccaaaggtgaaagctccggccattttcttaatttggtcaatatctatcctgattgtgacaacgataccctgttggcactcgcagacccaatcggccctacctgccactttggtacacacagttgttttgctccggcacaaactgaatggggatttctctatcagcttgaaaaattgctggcaagtcgcaaaacagccgaccctgaccattcatatacagcgaagttatatgccagcggtactaaacgaatcgctcaaaaagtgggtgaagaagggttagaaaccgctttagccgcggcagtgaataatagagaagagctaacgaatgaagcagcagatctgatgtatcacctgatggttctactacaggatcaagagctggatctgagttgtgtcattcgtcgattacgggaaagatgatatacccgtcatctttcaagctgcctctttgttggctgcactccctccccccggtcacatagtttgctatgctcccggggattcgctcccttgccgccgcgatgcaacttgaaatccattgggtatatgcccgtgatccaccgcgcttttccggtagataaaaaggcaaaaaccaatcatacgaaaaacgactatcaggcgacatagacgtctacgtcgcctttttgacagctccccgcccaattaggcataggtatctacacgaaatgaacgtttataaatcacatggccgctttaaagatcgaaacaatttcttcatgggtagcttgagtgggattagtcaaacaacatatatctttcaaggcattagttgctaactctggtaaatcttctaatttgacattcagttccgctagacccgacggaataccaatatcttttgacaacttacgaatttcagcaatacatgccgcagccccttgctgatcattcatagcgcttacatctacccccatcgcagcggcaatatctttcaaacgacccgcaaccgctttagcgttgaactcttgaacgtgtggtaataaaacagcattgcatatgccgtgtggtaaatcataagtaccgcccaattggtgagacatggcgtgtacataccccagtaatgcactattaaacgccatccccgccaagaattgtgcataggccatgttttcacgtgcttctatattgctcccatctgcaactgcttggcgtaaagagtgactaatcattgagattgctttcaatgcacaagcatccgttattgggctagccgcaggagaaacataggcttcaaccgcatgagtcattgcatccattccagttgcggcggttaaccctttcggcattcctaccattaattccggatcgttcacagacaaaacaggtgttattttcttgtcagcaatggccattttaatatggctttcagtatcggtaataacacagaaacgtgacatttctgacgcagtacccgcggtagtattgactgagattaatggcaaatgcggtttagatgaacggccaataccgacataatcccggatatcgcctccattagcagcgaccaacacaatagcttttgcacaatcatgtggcgaaccaccccctaaagaaataacgcaatcgctattatgctgacgcagaatatccaaaccttcctcaacgttaattgtcgtcggattcggattagtaccatcataaaccgtactctcaatatcaacatcagataataaagcttgaacttttgctgccaccccaatttcatttaaaacacgatcggtcacaatcaatgctcgcttataaccatcacctttcatcgtatttaccgcttcaaccaaacaacccgcaccaaacatatttaccgatgtcataaaaaaagtcgtagtcatcattgataattccttatattaaaatagttttagaatgaaaatatatatacccgttgtctttcaagttacctctttgttggtttcactcactcaccccggtcacatcgttatctatgctcccggggattcgctcccttgccgtcgcgatccatcttgaaatccttaaggtataaaaagtaaaatttgaaaaatcacctaatggaactacagatcattgctcttgcaacaaacataaataatagctctatttaaaccacataattcaaaaaatataaatatatctcggtagagttagataaggtttattaaaatagatatttgataattttccctcttggtaatatattccattggcaatataataaatacaataatcgagaagattaatatatcaattcaccaaattattacttaggagtttattttgtcctctaacgaaatatttaaccgcctgaccacattactggataatcatcatgccagctatcgggtgatggaacattcaaccgccggacattctgaagaagttgcaaaaatccgtggtacacaacttgggcaaggggcaaaagggttagtttgccatgttaaaggggaaggattccgtcaatatgtactcgctgtactgcctgcggatcaacaagcagacctctcttcactggcaaaacagatcggtggcaaccgtgcctcactggcaagtcctaaagaagtttttgaactgactcaatgtgtatttggtgctattccaccttttagttttcatccagatctgaaactggttgcagaccctttattatttgaacgttttgatgaactggcttttaatgccggcagccttgaacgttcagtgattcttaacacccaagattaccaccgaattgcacaacctgaattgatgatttttcgtcgagtagaataaataccatcgcgaaaaatgatatttgtcaaatagcctataaaaataggctatttaagataatattttaaatatactcatttaaaatagtaactatcccgccccaataagtttatacccgtcatttttcaagcggcctctttgttggctgcactcgctcaccccggtcacatcgttatctatgctcccgggaattcgttcccttgccgtcgcgatgcaacttgaaattcatagggtatatatcactagataaagttattattgctacattatacaaacattaaacagagaggtataattatcaaataccatgaatatctaattattcactattgaggcatatacaaaaaattaccaattacattatgggataattccctacccaaacaaaggtgtttcttgataggaattttcaattatttttaatttcagaacctttatttcaaatatcggtgaaaaatgacatgtcaattatattaatgttgtattgacaacaatttcatatgcctattcattatattttattaaatacaaaaacccacactcattgtattctcatatcgctttcaaaaagaaagatgacgttttttcaaaataaattttaaggaatagaaaagtatgactaataagctagttacaggtgcaacttttttcgatagaaaatactttctgggtgaagcgcaccattatccagaaaacgacatcattattccattgccttatgatcttaacgatagattccgttcagtaagaattggaacgctatcaaaagtttatgcatggcgtcatcagagcgattgggaacccggccaacgctatcgtgaatgggaatacgatcatccagatattgatagagaaattagaggattatctaagtttaaagtggcaccaaaagatacctgtctggttgcattaagacttattgatgatacttattcaggtattaaattctcaatgttcacgaatacacattgcgtgggcccagttgaaacaacaactgatgatgattatgcactggttggtatactgccatttgagaccgagttagttactgccattgcaataagaaataccagtactggagtatatatcaataacggatcattctatttctatcgtgatgcgaacggcgttgttactattgatgagaaagctaatttccctaaaaatctcagaatagttaatgtaggtggcaatcgttttgatattcatattatcagtaccgatttttctaactaatccggttataatgtaacaataattaaccgccgttttcagacaagctacgttctgaaaatttaaacaacaccgttgcggaatatcatcaaaaaccgcaacggtgtattcataaatcagcaaaaatttcgtggcgataaataattttttatttattatgatataagcatcattacaatagtcacttaacctttaaaaagaacattaaattaaggtccattagaaataatgttcacaagctatttcctttgagataaatacttccctaacgattaattttgaaaattatagtaaaacccaaccattccattattacatatcttattttaggtaattaggtatttttaaacaactttactttatgtatttttatgctaattttaacattaacccatcgaatattattcttctattgactggatatattacatctaaagatgaggaataaataaattattagtgggaaatattacacaaaaaaagccaatttttacaaatagtatataaatcatattctgaaatttaagctacgccgttgcggtcatttgttagaaaagccgcaacgacgtgttccagaagatcgcagaaattaaaaccacatcatatctgatgtaaactctccactctgctggtcaatcggtgataaccgggcttactccatccattcagtatggaaaacaccttctttatcagtacgcttataggtatgagcaccaaaataatcacgctgagcctgaattaaattagcaggcagtaccgctgaacgataactatcgtagtaagaaatagcagcagagaaagtcggggttgggataccattctgcaccccatacgagacgacatcacgcaacgcctgctgatattcatcagcaattttcttaaagtaaggtgccaacaacaggttagcaatatccacattttcgttatacgcgtcagtaattttttgcaggaattgagcacgaataatacaacccgcccggaaaattccagcaatctcaccgtaattgagatcccactggtactcatcagatgccgctttcaattgctgaaaaccttgggcataagagacgattttacccaaataaagcgcacggcggactttctcaataaattcggccttatcacctttaaatggttgtacatccggcccgctcaaaacttgagccgcagcaactcgctgatctttcagagaagagatataacgtgcaaataccgattctgtgatcaacgtcactggaatccctaaatccagagagctctggctggtccacttacccgtacctttatttgctgcttcatccaaaatcacatcaaccaaatattggcctgcttcatctttcttatggaaaatatcagccgtgatttcaatcaaataactgctcaattcgccgttattccagtcagtgaaaatctcagatagttcttcattgctcagatttagggcatttttcagtaaagaataagcttcagcaatgagctgcatatcaccgtattcaataccattgtgaaccattttcacataatgaccggcaccatccgggccaatataggccacacaaggttcaccttcagctttagccgcaatctcttgcagaattggtgccaccaatttatacgcctctttctggccgccaggcataatagatggacctttcaatgccccctcttcaccaccggaaaccccagtaccgataaaattaaaaccctgagcagaaagctcgcgattacgacggatagtatcctgaaaataggtattacccccatcaatcaaaatatcacctttatccagatgtggagtcagtgaagcaatagttttatcggttgcttcgccagccttaaccatgagcagaatacggcgcggtttttccagtgaatcgacaaattcttcgacagtgtaacttggaactaatttcttccccggattttcggcgatcacttcgtcagttttatcacttgaacggttaaatatagatacggaataaccacggctctcaatatttaatgccaggttacgccccatcaccgccataccgacaacaccaatctgctgcttggacatgaataactcctgtctgatgataattctgctcaccaataataattagcgcgcaatttgttaatgtgatcacatgttaactcaggacgagtcctaatggatagttattggtgccatcaataccgcgacaccccattttttggaaaaaacttcctcagatgaaaaatcaactattgaaatttgatgagtcaatgcccattattcattattcggcatgagccgtcatattaaaaggtaaaacaaactgtatggaatggatcgctgatccgacgatatgggctgggctagttactcttatcgttctagaaattgtcctcggaattgacaacttggtctttattgccattctggcagataaacttcctgaaaaacaaagagacaaagcaagaattacaggtctaggttgtgcgttactgatgcgtatcgtactgctttttagtctttcctggttgataacgctaactcatccattaattacgctttgggaacatccatttagtgcccgtgacctgattatgctaataggtggtcttttcttactgttcaaagcgacaatggagctcaatgaacggctggaaggtaaagatgcccactcaggacaacaacgtaaaacatctaaattttggacggttgtcgttcagataattgtccttgacgctgtattctcactggattcagtggtgactgctgttggtatggtagacaacatcggtatcatgatcgcggccgtcaccattgcgatgttcctgatgatactggcaagtaaaccgttgaccactttcgtcaatgctcacccgactatcgttattctctgtctgagcttcttgttaatgatcggtttcagtctggtcgccgaaggttttggttatcatatccccaaaggttacttgtacgccgctatcggcttctccattatgattgaagccttaaaccaatttgctcaatttaaccgccgcagatttcttactgcttcccgttcactacgtgaaagaacagcggaagccgttttacgtatcctgagtggtaagcatgaaaatgcagaattggataatcatacatctaatctgatttctgataatcaggaagtgtttgatccacaagaacgtcaaatgattgccagggttctaggcatggcgcagcgtaacgttaacagtatcatgacttcccgtcacgacgtggagtaccttgatattcatgcaccaactgaaaatctgacgcaaatactgaataaaaatcctcacacacgcattgtggtaactgatgaaaatatcagtgacgaaccattaggtgttgtccatgttattgatctactgaatcaacaactcaaccaacagccttttgatttacattcgctgataaaacagcctctgattttccctgaacagctttcactactccaggcattggagcagttccgccaggcacaaactcacttcgcgtttgttgtcgatgaatttggttctgtggaaggtgtggtgactttgaccgacgtaatggaaactatcgcgggtaatttaccggtagatggcgaagaaactgatgcccgccatgatattcaagcgactgaacatgggggttggatcgccaatggttatatgccgctggatgatttgatcctttatgtccctttgcaactggatgaaaaacgtgaatatcaaaccttagcaggtttgttaatggaacattcacaacatattccacggcaaggtgagcaattacagattgataattatctgtttgaaccgttggaagtaaccagtcaccgaattaataaggtaaaaattacccctctggtgtcaaatgaagaaaataaaaaataactcagtgttattgatgactcatcatatttgtcatcactgagtttttcctctgaaacaaaataaaacccggtcagtttaaactgtaccgggatttttttaatcttttctattaatgccatatgcggaattctatgcggatacggttaaatgatttatctatacccgtcatctttcaagttgcctctttgttggctgcactcactcaccccggtcacatagttatctatgctcccggggattcattcctttgccgccgcgatgcatcttgaaatccatagggtataactagattaaataattttatattcagaacagaaaagccatagcttctcaattcaattatcaaaatttaatccacaagttgaaatccacctttgtactgaaattgactgctcaaacaactatgctcagacaacgataagcattcatttaagcataatagtcaactgccggattgagcggtcaaatcaggcatgagttattaatacagctaattactgctgcgttcaacccaatcgttaatagcctgttttaccttgttctctaactcattatgtagcaattgctcaatatccaagttgtattgcagattactccaattaccgtaaacccgcagtggtactttcatttttcgcagacgactaaccaattcattatccttgccccatccttgtgttatctgtacttttaaagcgacatcaacatcttgtttaagcagattagtcttaccctgcccatcaatattcagcaaatcggataccgcatgcaatcgactgatttttatatcacctcgattcagtaccgctttaacatcaagctttttagcgcgggtgaaattatccatattatcagggatattcactttatccgttgcacgagcaacggattgctggattaattgggggatatttaatccatacattttggcattaactaaactgaaattaagatcaccctgccaaatatgcgaaatcgcataaccatcatatcctttaccagaaagatccccattcagatcgaatttgccactaaatgccggaggtaaggaaaaggctttgagtactggttccagttctatattccgcagtaaaggttttgcgtgtaacttaagttgattacccgttgcatctaaaataaccggaatagagaaatcaccaccaaataatttgccattcagagtagaaatttcagcaataccactattatttgtcgctttcaatatcagattatcgatctccattcctcgataaacaaatttgtccgcattaatagtcacattggcgttaaagtcattcagaaatgcagcgctataatcaggctcggcagagcttgaaacggcgattaccggtttagctgaactattctctatccggtaataacgtttaacttctgaaccctctttaggaagcaagtcccatcccatcagattatctaaattcagtttttgggaagataaatcgatccgataatccgcatgagcccccaacattgcttttatactgccatgcagttcactctcattagcggtgaaacttagcgcctgtaaagaaattgtttgcagttcatctgtcgtctctttttgataaacagcatgtacttttcctgaaccactaattcctcccgtaggtatacctgcgccctggagttgataatcaaagaagtcaatattacccgcaacacgatatggataatcagtaatatcgacatctgcattaagattaaaagccaagtcttgctgattcttactgactttgctacttaactctacgctgatatggttttggttatctcgctccattagcagattaatatcgcggacatttaactgctcatgatcatctcgctgccaaataagcaaactatccgcgatcttaactctggcaatatcaagctcccaaccctcccccttcgcaacaggattggctgtactccctgttggtgcaataggggtattcccttttttctgcgactggctctccggggttactctcaatatcgcccctttcagcatcacctctttaacggcaagctgatgagaaagaagcggccacaacgccacatcaagacgcatattttctgccatcactgttggctgcgccgcccctggggccgttaatgacatacgcccggtaatgatgctcaattttggccagacatgccagcgcataccatcttgcaggacgagttggtagccactcttcttttgcacctgcttgaccatataagcccgaaagtcatttgggtttactaacatgactaatgctgccagaccggtaataatcacaaccagcaaaataatcagtgttgtcagcaatctcttcatgacttcctcagctttttttgtcaaaacagtcaatgcagctcaatagccgataaagatgttaatcttcatcaatacgactactcaccgcaccctgttggtttttatatttcgcatcttgacgacggttatacggacggtcagcggaaccagacaatggttcaaaactcaaagcaccgatgaccatacccggacgtaacgccagaggcaatttaccagagttatagaattcaagaacaatttgaccatgccagcccggatcaatccggtgtgccgtcacgtgcaccatcaacccaagacgagcaagcgaagaacggccatcaagccagcccaccaaatcatccggcaatgtgacagactccagcgtaacggccagtgccaactcgccaggatggaggaaaaaaacctcatcgtcaggcagaattatttcatcactcatcacacgatcaagcgcagcactgacctcatctttcggaccactcaaatcaatatatgccgcagtatgaccacagaaaacacgaaactgattcccaaggcgcacatcagcagttgccccgttaatgcgttcaatcggcggacgtggagcaatgaccaatttaccctcatcaagccatttaataatgtcgcggtcacagagtcgcattatttcctctccaatacgatgctgcttatcaatgcctgacaagcaaagttttattattcgcagaactgaccaattttggctttcaatatatcaattgctactcggtttttacccccgcgcggcacaataatatctgcatattgctttgatggttcaataaattgcaggaacattggacgcacagttttatgatattgctcaatcaccgaatccagagaacgcccccgttcatgcacatcccgcttaatacgacgcataaggcaaatatccagtggcgtatcaacaaaaatagagaagtccatctcctggcgcaagcgcttatcggtcaataatagaataccttccagaataataacccttttcggtgcaaaatgaatcgcttctggtttacgagtatgagcaacataatcgtattgtggtaattcaattgattcacccattttcagcgcttgtaggtgagaaaagagcagattgtgatccattgagcttggatggtcataattagtcttataacgctcttccattgatagatcgctctgatctttataatagcaatcctcgggtataataccgatattgtgatcaccaacctgagcgcgtaattcacgataaagtgtattagcaatgagacttttacctgaggcagatgcaccagaaattcctacaattgtgcactgatatgcttcgtcagccataatagagattaacctgattctagaaaaaaatgggaacaaagcacttatgagtgctaagtttggcgagattatagggagttaatggtatctgttccagtgtaaacaagagaagtctcacttttttcgaggcgtttcgcataaaaaccatgtaacgagggaaatcgaacaagcatatttctccccatacaaaatctccccatacaaaaagcgggcaatgaaaacatccaccacccgttatcttcaatcaaatacctgcattaaacagcacggaacgaaatttctgttggtatcttctcgccttgccaatacatctgtgctgaaatattcgcggcaatttcgcgataaatatcggtaaattcactatcaggattactgataacggttggctcaccacgatcaagatcttcacgcagtgaaatatgcagcgggatttgtcccaataatttacagtgatatttagccgccaatttttctgctccacccgttccaaaaataggttccaggtgaccacagttaccacaaatatgtgtactcatattttcaataatacccagtacaggcaccttcactttctggaacatgacgatgcctttcattgcatcaattaaggcgatatcctgaggcgttgttaccaccagtgcccccgttaccgggatgttttgtgacaaagtgagctgaatatcaccggtccccggtggcatatcgataaccagataatcgagatccggccataatgtatcctgtaacatctgcatcaatgctttactagccattgggccgcgccataccattgcattgtcatctgtgactaaataaccaatcgagttagtggcaaggccatgcgtcataatcggtgccatatgctgcccgtctggggaagttggacgctctttggtggttcccaacatactcggaacagaaggaccgtagatatctgcatccagaataccgacttttgccccctcctgagccaatgccagcgccaggtttacggctgtgctggatttacccaccccacctttacccgagctgacagccaaaatattacggacaccattaattcccggcagatcattagcccgacgtaatgtgctgatatcatggatcaatttccacgctaccgatttcgcaccagttaccgcctgtaattcttccgtggtggccgcttttaacgccttaaaaccgctttgccagacaaacggcatcagtaattcaatgtgcaagacaccatcaagcatcgtgcagtgatgtaacgccttcaatgttgtcaaatcacgttctagtgtcaggtgtgtaaaagtagcaagtatttttgttacctgagatttcagcaggtcaggattggtctgctcgggggattgtgagttcatcccggctcctttaatgattatcattagctaaaaaccatctcgccatcataacagaacccaatgcgttcggataaaattagcgacaaaaacccgcttccggctcactgattcaatttttatccattaacaacctcagaagggtttaggtttcaaggcgcactggataaaactcattaatattaaaccttaccctagcgacaatttttttgatcggttaacatcaaactccctttttcacttattggaagtcagatccttactatgtctcaagtcgcaaaaaaattattggtgacgtgcgcgttgccatatgctaacggtccaatccatctcggtcacatgctggaacatatccaagcagatatttgggtccgttttcagcgaatgcgcggcaaagaggttcactttatctgtgccgatgacgctcatggaaccccaatcatgctgaaagctcagcaaatgggtattgctcctgaagagatgatcgcaacggtgaaccaagagcatcatcaggattttactggcttttcagtgagctatgataactatcactctacgcatagcgaagagaaccaaacgttatcaaccaaaatctatctcgaactgaaaaaaaacggtcatattaagaatcgtactatttctcagttatatgatcctgagaaaaatatgtttctgccggatcgctttgttaaaggtagctgcccgaaatgtaaggcagaagatcagtatggcgataactgtgaagtttgcggttcaacctacagcccaactgaactaatcaacccacgttctgctgtctccggcgcgacgccagaaatgcgtgaaacagagcacttcttcttcgatctgcccgcattcagtgacatgctgcaagcttggacccgctccggtgccttacaggagcaagttgctaacaaaatgcaggaatggtttgaatccggtttacaacagtgggatatcacccgtgacgccccctatttcggttttgaaattcctgatgcgccgggcaaatatttctatgtctggctggatgcgcctatcggctatatgggttctttccaaaacctatgtgataaacgcggaaatctgaactttgatgagttctgggcaaaagattccaccgctgatctgtatcattttatcggtaaagacattgtttatttccacagcctgttctggccggccatgttggaaggcagcggttatcgtaagccaaccaacgtgtttgttcatggctatgtcaccgtcaacggtgcgaagatgtccaaatcccgtggtacttttattaaagccagcacttatttggatcatctggatgcagactgtttgcgttattactatgcagccaaactctcggctcgcattgatgatatcgatctgaatctggaagattttgttcaacgtgttaacagcgatatcgttaataaagttgttaacctggcctcccgtaatgccggcttcattaataaacgctttaacggcaagctggcggataaactggctgatccggcgctttaccaacagtttattgatggggcaaaggtgattgcagaagagtttaataaccgcgaattcagcaaagcaatccgtgaaatcatggcactggctgatttggcaaaccgttatgtggatgagcaagcaccgtgggtggtggcaaaagaagaaggccgtgatgccgatcttcaagctatctgttcaatgggcatcaacctgttccgcgttttgatgactttcctgaaacccgttttgccaagtctggcagaacgcgcagaagcgttcttaaatacagaactcacctggcatggtattgaacagccgctgctggatcatcaagtttctgcctttaaggccctgttcaatcgcattgatatggataaagtggacgctatggttgtggcatctaaagagagcatcaacacaccacaaaaagtcagcggtccactggcagaagatccaattcaggacaccattacctttgatgattttgccaaagttgatatgcgcgtcgcccttattaaacaggctgattttgtcgaaggctcagataagttgctgaaactgatgctggatcttggtggcgaaactcgccaggtattttcgggtattcgctccagttatcctgatccaaaagcactggaaggccgtttaaccattatggttgctaatctggcaccacgcaaaatgcgctttggtatttcggaagggatggttatggccgccggacctggcggaaaagatatctttttactcagccctgacagcggcgcccaacccggtatgcaagtgaaataatagttaatttatttcattaatatttttacccacggggatcagtaatggtccccgctttattttaatgtgagctttgacatccttgtatcttggatttatccagagcatcactttcaacatgccagcgagcaaggcgtgaaagttgccagtaaattagagtcttcatttcaaaatacttgctgcttatcagtagggactattactggggcgactggtatccagcttgtgtcttaagaatcggttttctgggcaaactttttcgttaattgtcgaacaagggccgatagaagatagatctgcacctggattttttagctgttttgtgttgaacaaatcaactaccgtaccttggttttgatcctcttttattggttaattatatgtatatgtgacatggaaaatttccatctccagtatccactttagattttcttcaataaaaagtaagttcaaagtagttaataaaattatcactagttatagtgagataattcagttaaattatcatcgaatttagaatggaattgaagtaaatcaatgtgtaggaaaattattaggaggttagtatggccataccggcatatatatagttgcaagatgatggtggtgcagacattaagggatctgtcgatatacaaaatcgcgagggtagcattgaaatcctgagttttaaccatagtctatatattcccactgatagtagtacaggaaaactaacgggtaccagagtacatggttcaatgagtttcgaaaaagaatttgatcgggcatctccatacctttataaagctgttgccactggacagacgttacaatctgccaatatcaaatggtacagaatagacaatgcaggtcaggaagaggagtatttccatatccttatgagcggagtgaaaattgtttcaatttctccagtaatgcataatataaaagatccatcttatcaacatcttaatcatctagaatccgttgaaatcagatacgagaaaattacgtggaaataccttgacggtaacatcatttactctgattcgtggaaagagcgctaagaaataacgccggaatatccggcattttaccgaagtctattaaagatccgactggcgattttgtgtataattagagctatcattaagagtgcaaagatgtctataaacaattcaatccagctatcctcgtaatttcctcctaaccaacccaaatttatcctattcaggaaacgttctaccacacgatacacctgataaacagccaagtttaacggagtaatgagccggaacgctagcagtgcgatcaacaggcatagtaaataaccaaaaaagctaagaaactttacacgcaccaaaatttgtattccccgtaacatcaactctaccgtatgccatcaatgagctgcccggtactttaaacttatgggtacggagcagagcgtttcgtacgatattaaagtcagaaacacgataaaaggtgatacatccccaagactcgccgctaccattcggacgcaatggatgaagacgaaatgctccgcgtcgaacaccgttcacgaatatataatcattcattgtctgaaaactatataacccaaaccattgagaatgattagtaccatgaatcatatcaagagctgtgcctctgacttggttcgctatgctaccaaccggacgatcaacaatccaatactgacctggaggaattgctgatttctcaatgtaagaacattcagacttgttgacgtatggatcttgaccagagaaaacgtcaaatataccaacgccataacaatgaaatttagcctttcgtccattatcggacaggtcgttataattcatcctacaaatttgcatggttattcccatataatatatctgcgagttgtattccaacccgcaattgattaaattactattttttccatagcgtatgttttcgtatggttggacttcaacgctatcataaagttcacttttttctagaaaacctcatattaaatcaaaccacacattaccaatcttgctaatcattttatcggggctgtaatccagaaccgccgaaatttccgtcatcctttcgaaggaaaagatggcacattcccaaggtcacttgtatgatgaatacctcaccggaattaggaattttgttatgtcgtttcgtgaagtactgattgttggttggcagtatctaagagcatttgttctgatttatttatgtttgctgacaggtaatgccatttcttccctactacctatcattattcccggcagtattatcggtatgttgatcttgttcgttttattagctttccagctaattcctgctcattgggcaaaaccaggctgtagtctgttactaaaaaatatgactttgctgtttctgcctattggcgtaggcgtaatgaattattacgatcaactcagccaacagataattccgattgttttttcatgcctgatcagtactgcaattgttatgattatcgttgcttacagttcccattatgttcatcgtgaacgtccgattgtaggatccacatcagaaattaacaatgaacaacagaaacaagagaaacaagagaaataaaaatgttaagtcacatttggtggtcactgccattaacattgattgtattttacaccgcaagaaaactttcactacgatgcaaaattcccattctgaaccccttattggtttctatcgccgtccttgttccaatattattaataacccacacgccttatgaacactattttgccggcagtcgaattctaaatgatctactccagcccgccgtagttgcactggcatttcctctatatgagcagatacaccagatccgagcccaatggaagtccattattagcatctgttttatcggcagtattgtcgctatggtgacaggcactgctattgccttgtggatgggcgcaacgcctgaaatggccgcttcgatactgcctaaatctgtcacaacaccaatagcaatggcagttgcagatgccattggcggtattcccgcaatcagtgctgcttgcgtcatttttgtcggcattctcggcgcaatatttggtcataacctgttcgatcttttacaggtaaaaaccaaagcatcccgcggcttagcaatgggaacggcatcacatgctttgggtaccgcccgctgtgcagaggtcaatttcgttgaaggcgcatacagctcattggcattgatgacctgcggtatcattacttcactaacagccccttttgtattcccggtgctgctatacctatttagctagtttatctattaggaaatttgataatattcactcgattactaacttcaattacataattctcatcatctatatgatatttatcacattacaaatctcatcagacaacttagaatgatcttaagctacttcggagatcacgctatgcaagctcgttttcaccccatatgggtacagttgccctctaaactacaggatgcacttttaccttacgcaggaaacgatgactttcctgccatgctcactgctgagcaagctaaatcgattaagaaagcctgcggttttgacgataacaccttggctgtcgccctgttaccactcgcagcggccagttccctgacaccaatctcacattttaatgttggtgcaattgcccgcggtgaaagcggaaacctctattttggcgctaatatggaatttgctggcgtaccactacagcaaacgattcatgctgaacaatgtgcgattactcacgcttggttattgggcgagaaaagactggcatctgttactgtgaattactctccgtgcggccactgccgtcaatttatgaatgaacttaatagtggcacacaattagagattcatctgccaaaacaggcatcttcaacattagatcactatctgccagattcttttggcccaaacgatctgggcatcacaactttgttgatggatccggtcaatcatggctataaactagaaacgacggataaattagtactaacggcattagatgcagcaaaccagagctatgccccatacagtaattcctacagtggtaccgcacttctgggaaaagatggaataatttatcctgggcgttatgcagaaaatgcggcatttaacccaagcttgcccccattacaagcagcactgattctgatgaacatttctggtggtgattgcctggctatcgaaagagcggtgttagttgagggaaaacacagtgatttatcccaacggagtgcgactcaatctatacttgctgcactcggttgcagcaaatttgattactacactttctgagttcagtggaaaattcatttttccctctatgcagatagagggttttccgctataaaaaataattaccgtaacattttattatctaactctggatgttataccctatggatttcaagatggatcgcgacggcaagggagcgaatccccgggagcatacctccaattaagtaacatttactgtacatatttttcctatctcttaggatctgtagctaaccttattatccatttagttcaaagagtaagattcatggaactggaacacgaaagtaaacgtccactatatattccctattctggcccaattctgttggaattccccctgctgaataaaggcagcgctttcactgaagaagaacgtaggaactttaatcttcacggtttattaccggaagcggtcgaaaccatcgaagaacaagctgaacgtgcctatcggcaatatcttgatttcaaaaatgatgcagataagcacatttatctgcgaaatattcaggacactaacgaaaccctgttctaccgcctgctggatgcccatttgaacgaaatgatgccaatcatctacaccccaaccgtgggtgaagcgtgtgagcacttttccgatatttaccgccgtgcccgtggcctgttcatctcacatccaaacaaagcacatattgatgatatgctgcaaaatgcgaccaaacaaaatgtaaaagtcatcgttgttaccgatggtgagcgtatcctcggtttgggtgaccaaggtattggcggtatgggtattcctatcggtaagctctccttatatacctcctgcggtggtatcagccctgcttatacactgccagtcgtcctggatgtaggcaccaacaacccacaacgcctgaatgatccgttatatatgggctggcgtcacccacgtatcaccggtaaagaatatgatgaattcgtagacgaatttattcaggctgttaaacgccgctggccaaatgtgctactgcaatttgaagatttcgcacaaaaaaatgccatgcctcttcttaatcgctatcgccacgagatttgttgctttaatgatgatattcagggaactgccgctgttacgttaggtagcttaattgccgccagtcgcgcggctggccgtcaattaaaagatcaaacggtcaccttcctcggcgcaggttctgccggttgcggcattgcagaacagatcgtcgcccagatgaaatcagaaggtttaagtgacgaacaggctcgtgcccgtattttcatggttgaccgcttcggtttattgacagacaagctgccaaatctattggatttccagaacaagctggtgcagaaaagcagctcattggctaaatgggatgtaaacaacgattcaatctcgctgcttgatgttgtccgtaatgctaaaccgacagtattgattggtgtttcaggtcaggcaggtttgtttacagaagagatcatccgtgagatgcataaacattgtgaacgcccaatcgtcatgccattatcgaatccaacttcccgtgttgaagcccgtcccgaagatatcatcaactggacagatggtgccgctctggttgcgacaggtagcccatttaatccggtaaaatataaagatcaggaatatccaatagcacaatgtaacaacgcctatatctttcccggcattggtctgggtgtcatcgcatcaggggccaaactggttactgacggtatgttgatggcagcaagccgaacattggcgaattgctcacccttagcccaagaaggtcaaggtccgttactgccacttatcgatgatattcaagaagtgtcacgcaaaattgctaaacaagtcgccaaagaagcacaaatacagggcgttgccactgtgacctcagatggagcactggatgaagcgattgaacgcaacttctggaaacctgaataccgcgtgtacaaacggacttcattctgatttttatcattaaaaatacgtaaaaagcttgttatacccgtcatctttcaagttgcctctttgttggctgcactctctcaccccggtcacatcgttatctatgttcccggggattcgctcccttgccgtctcgatgcattttgaaatccatagggtatagttctcttttactatcaagcttttttcttatagagaaaacttgcttcgaaatttcaggtaaagtagcctttaacaaatccagtcattaatgtgtataaggcaaaagcatgtggaatcgcctgataacaagtctgttattcatcacagggatgctgatactgacagctattgcacttgaccgctggatgagttggaaaacagccccctatgtctttgatgatctcaaacaacttcctgaacgtgaagtgggtatagtacttggtactgctaaatattacctctctggtgcgccaaatcagtactatatgtaccgtattcagggagccattaatgcttataacagcgacaaaatcaaatacttgttactgagtggtgacaatgctcagcaaagttataacgaaccggtcactatgcgcagggatttggtaaaagcgggtattcctgctgcaaatatcgtactggattttgctggtttcagaacacttgactcaatagtcagaacccggaaagtttttaacactaatgatttcacgattattacccaacgatttcattgcgaacgagccctgtttatcgctatgcatatgggaattgatgctcagtgttatgcagtttctacccccaagaatatgattaccgttcgattacgtgaaatcattgcccgtcttggtgctttgactgatctttatattctgaaacgcgaacctcgtttcttgggcccgttgatccctattcctgctccgtataaggtaccaaaaggtatgactaattaccccgccgtcactccagaagagttacggacaatggataaaacccagcttaagccgaccgggccaacaccgccgtgatatcacgccaccgctgttctactggcccttgcgggtgacgacgtaaccaccagcatgaaaaaagaatattcaccgcccaaatgggaagaataaaggcaagtagttccaaacggctaaattgaccaaacaacccaaagttataaaatagcagggtgcagattaaggtttgtagcaagtaattactcatcgccattcgcccaacctgattgaaccagtaattaattcgccagcatgaaatgaccggccagaaaccatatattaaagccatataccccagtgcctgaaatggcgttaccaactcagcaaggatataaccgacaatacctgaccaaaagtaatcccaattatggatatattggaaaaccacagagaatatctgaacagcaatactgagcggtatcagcactagcgccacatttcgataatggctcactgaaaattcaccttttagccaaccattacgcattaatccagcaccacatgacataataccgataagctgccaaccatactgaacaaacagcatgaccatcatcaacatgacctgattgaaacgctcttttactgccagccatccaccagacgttttccaatatgtttcgtataacatctggaattccgtcaactgccaagaaacatcattagattcgccgctggaaaaaaagccgagaataaacaatagcactaatccgatcagataaaaaatagcgcctttcataaataaccggttactggcgctattttggctaatcaattgaaaactgaaaaaacctgctaaactatacgagagcaaaatatcgccatcccagaataggataccatgtcccattccaattagagcaagtatggttaatcgtggataattccagattttgccccttggtaatagtaactccaatgctgcaccaaataagaaggccaaaatacacaggaactttccctgaacaaggacgctaagtacagaccagacaatcaaatcagttaaagaagctgaaccattatataccggattcaaataagcggcggatggcaaagcaaaaccggagatattgagtagcaatatccccagtattgccaagccacgaatactatccagtgagtcaattctctggcaggccatgtttatatcccggtgtaaaaattacacatggcgagttgtacgtaaaaactcttgacgggtattttggctagatttaaacaatccccccagagaggttgttgtcgtggtactggttgcatcacggataccccgcgctttcacacagtaatgaaccgcatcaatcgatacggcaacattattggtaccaaggagtgtctgtaatgcaatcaaaatctgctgggtcaggcgctcctgaacctgtggacgctgagaaaaaaattgcacaatacggttaattttagacaacccaatcactttatcttttggaatataggcaaccgtcgccttgccatcaatggtcacaaaatggtgttcgcaggtactggtgagtgtgatatcacgaacggtcaccatttcgtccactttcattttattctctatcaatgtgattttcgggaaattgctgtagtccaatcctgaaaaaatctcatcgacatacattttcgcaatacgacctggggtttctgccaaactgtcatcacgcaaatcgagattcaacagtttcataacttccgtcatatgctcctcaatccgcgctttgcgcacttccggtaccaatgcctgaccacgcaaaggcgtttcaaggccacgagtttccagcgccgaatgcacaagctcagcttctttacttaaggatgacattattttctccaaagacattactttccatcatctggcgggtagtaaaattcaagtcatgaatactatcactgaaacaatcacgactaacagataactattgcacacactgtaaatgagcacgtggtgattatccagtgattgcttttcataattatacccgtcatctttcaagttgcctctttgttggctgcactcacccaccccggtcacaaaccaataacccggcaatgaccaaggtaatcaatgcaacatataacgctggctccaatctcccggttattgtggtagaaaccgctgacagcatcggaccaattagctgcccgacagcatatccggtggttaacaatccggccatataacggctatgttctggcgctaattcacgcccatattgaaacgccatttgcaccacacacataaaacccccaccaaccaacaaagagcttaatgccagaccacctattcccggaatgatctcagcgataagaatgcccacagcctgaatccataaagtgatcgcaagccggatttgcgttgtcagcatatgacgggtcagaatagcaaaaccaatgccgatgactgcggcaccaccaaatattggccagacaaactgcgcaaacaagctgccagggaaacgatcactcgccatttgtgaaagaaaagtcgctggcaaaatataaccaaagcccgctaagctgtaactccataccaactgcttaattgcaggcgtcaaagtcagtttcttcacctcagcctgtgaacggtgtaactcaccaccacggggtaaatgccgactaatatagatactacaaatcagcgccaaaatgccatacaacatccatgcttcggcagcgctcacttgccatgcttgaataccaatagcaaggataccagtaacgaatatcccgactcccggtcccgcaaatatggcagcactcaacgcaggacgattcaatttagccaactgttcattggcccatgatgtcaccaataccaatgtccagccacttgcccaaccaataagaaaacgggcaatactgtgcaatatcgccccatacagtagtgcagagagcaatgtgataatcactgctccccacaatccggcccaaagccgatattcaatcaaacggtgcgcccgcattgcatcgtaagaaccagccagatatcccaaatagttaaaagccgcaacgatacctgccccagttagactaaactggaattctgcgatcattaaaggcacttgaggagtgaaggcagtacgcccaattcccatagcgacaaccagcgccaaaaatccactcattgcgatatgaaaagcgaggtagcggtgactttgttgaggagaagttgaattgttcatagccataaaatgttatttttttaatttatttctcataagccataacaaaaatcaaataaaatacacacttttaattaacaaaattccagaaaaacgtaaattatttctgcccataaataaaaagtcagtaagcaattaatgacagtatctggaacatcggagtatatgaattttcgtcctctgctccatttatttatttttacctctactcagttacctctattaaggttaaatcgagttttacaacataacattagctgaattaaccaagcttccacacaatattgtccacacaataatgccaaaatagtactaacaaacttgtctataccctatggatttcaagatgcatcgcggcggcaagggagtgaatccccgggaacatagcaaactatgtgaccggggtgagcgagtgcagccaacaaagaagcaacttgaaagatgacgggtatataagagatatgattcatcatgttatgtacaaatattaataaggagcattgttatgtataaagcatttcaaggtaagactgctattgtaaccggtggtggaaccggtataggacgggctatcagtattatgctggcgaaacaaggtgctgctgtcgcagtgatctattcacaaagtgaacttgaagcgcaggaaacaacagaggccattatcaaggatggggggcaagctatcgcgataaaagcagatgttgccgacgaatcggctgtacaagccatgataaacaccgtcgtggaaaaatttagcgggatcgactatctggtaaataacgcggcgacaactaggcaacttcaatttgaagatcttgatgccatatctagcgatatttgggatgccattattgatgttaatgtgaaaggcacatttcattgttgccggtatgcggcaccttatcttaaagcaagaacagggagtgctatcgtgaatgtcggtagtatcgccggcgaaaccggcctgggctcttgtatcccctacgccgcttccaaatcagcggttcacggactgacaaaatccttagctcgggcactggctccatcggtcagggttaactgcgtagcgccaggtgccgttgaaacaagatggtggaaagggagagaagagaaaatgcatacgctttgcacttatttgcccttagaaagaatttcaacgccagaagatgttgcagaaataaccttaatgttgttaaaagcagaatcgatgacaggacaaatcataaccgttgacagtggtcaaaccttataagcgcttacgcgctttctaacctggctatgacagcagcaaattttctaacgccaggttaatcgtcgtgttctacatacttatcacatgtcgcggcgttttggataaccaacaccaatatcgccgtgtttatggaacatacgagcaaagtcaaatatcactcacacatatgatgatctctgccataatgccactaatgaaaaaccttatctgggagcatcattatggatcactgtcatacctctgaattgatctctttgcagcaggcgttggaaaaacttctgacgcaagttacaccactgactgacacagaaaccgtcagcctcccgcgaacatcaggacgcattactgcaacaaatattatttctcctatcaatgtgcccccttttgctaactcagcaatggatggttatgccgtacgccatgcggatttaaacagcaataaaccactgcctctggcaggaaaagcactggctggcgtaccttttcaaggagaatggccagttgcaacttgtatccgcattatgactggcgcaccgattcccataggcgctgatacggtcattatgcaggagcacgcagaaactactgatgatggcatcgttttcactcagccagccaagcaaggtcagaatatccgtctggctggcgaagatattgctaaaggtgcagtagttttgtcggcaggcagcaaattatccaccgctcagttacccctaattgcatctttaggcatcaccgacgttgaggtggttcgcaaattaaaagtcgccattttctcgaccggtgatgagctacaagctatcggtcacccacttaaggaagggcaaatttatgataccaaccgtcttaccgttcgactgatgctggagaaactggattgcgacgttattgatttcggggttattgcagacaatcctcaagctttacgccatgttttcgcacaagcagatcaaaaagcagatttagtcatcagcagtggtggcgtttctgtaggtgaagcagactacactaagcagatactggatgaattaggcgaaatcagtttctggaaactggcaatgaaaccgggtaaacctttcgcttttggcaaactaaaaaacgcctggttctgcggtttgcccggtaatccagtttcagccgttctcactttctatcaattagttcaacctttaatcgcgcgtctatccggttttacggcatggcaaccccctatgcgtatgcgcgccaaggtcaccacgccattgaaaaagagaccgggaagaatggattttcaacggggcattacttcggtgaatgaacaaggtgaactagaagttcgtacaacaggacatcaaggctctcatatatttagttcattcagtcaggggaactgcttcattgttctggaacgtgaacgtggacaggtagaagttggtgaaaatgttgaaatcgaattgttcaatcacttactgaaaaatgaataatgaccattgaactaacagatgcagaaaccctacgctataaccgccagattgttctacgcgggttcgattttgacggtcaggaaaaattgaaatcttcggcgatcctgatagttggtgccggtggtttaggttgcgcagcatcccagtatttgaccgcagcaggtgtgggaacaataacactgctggattttgataccgtttctctctcgaacttgcaacggcagatcctacatcgagatgaacgtatcggcatggctaaagtgcattcagcccagttgacactccgagcaataaacccacatgtcacgattaaaaccgttaatggattactggaagatcaagcgctagatgaacttatcagccagaatgatgttgtcttggattgtactgataatgtaacaatccgcgagcaactgaaccgcctgtgtctggcaaggaaaacgccactggtttccggcgcagctattcgcatggaaggacaactcactacatttacttatcagccaaatgccccctgctaccgttgcctgagcagactgtttggcgaaaataatctaacgtgcgtggaaacgggagttatggcaccattggtcggtaccatcggtacattacaggcaatggaaaccatcaaactccttactggatatggcaaagtcagcagtggaaaggttttactgtttgatgcgatgacaatgcaatttcgtgatattaaattacttaaagatcccaattgcgaagtgtgcaacagttaatttatccaccgatagaaataacaagcaatagaaataacaaacaatagaaataacacgccccggttatctcaaccagggcgatttatgccacaagatgattactcaataattccctgacttcttagatattcatcataagtacctttgaaatcaatgaccttatcagatttaatttccatcactcggcttgccaatgagctaacaaattcccgatcatgagaaacaaatatcaaagtacctttatacaattcaagcgcaaggttcaaagattcaatagattccatatccaagtggtttgttggttcatccattatcagaatatttggctgttgcatcatcaacttaccaaataacatccgtcctttttcgccacccgataatactttgacttttttcttaatgtcatcctggctgaacaacaaacggcctaatacactacgaacagcttgttcatcatccccttctctcttccattgactcatccagtcaaaaactgtcagatcacagtcaaaatcactggcatgatcctgagcatagtacccaatgctactattttcagaccacttaactacaccactggttggctctgtttcaccaacgagcgttttcaagaaagttgttttaccaataccgttagcaccaataacagcgagtttttcaccaacttccagcaggagattaagatttttaaacagagggccattatcatagcctttagtaaaaccttccaattccagagcattacggaacaatttcttatcttgctcaaaacggatataaggattctgacggctggatgctttaacttcttccaactggattttatcaatctgacgagcacgcgaagtcgcctgttttgatttagaagcattagcactaaaacggctgacaaaagactgcaattccgcaatctgtgctttcttcttcgcattatcagctagcagacgttcacgagcctgagtggcggcaaccatatattcatcataattaccggggaacagacgcaactcaccgtaatcaagatcggccatatgagtacaaactgtattcaggaagtgacgatcatgggaaataataatcatggtgctgtttcgttcattcagtatttgctctaaccaacgaatagtatcaatatccaggttattcgtcggttcatccaataacagaacatcaggattagaaaacagcgcttgagccagcaatacacgcaatttccagcctggtgccacttcgctcatcaaaccgtaatgctgttctactggaataccaacacctaacaacaactctccggcacgcgcttcggcactataaccatccatctcgccataagcgacttccagatcggcaacgcgatagccatcctcttcactcatttctgccatggcatagatgcggtcacgctcctgctttacctgccacagttccgtgtgccccataatcacggtatccaacaccgtgaactcttcaaaagcaactgatcctgacgcagtttaccaatacgttcattgggatcggtgctgacattgccgacagagggtgtcagatcacctcccagaatttcataaaagtgggattaccagaccattagcgccatcagaccataacggttaccgttgccaaacttgacagaaatgttttcaaacaggggcttactgccaaactgcatggtgatgttgtttgtacttaacactgcgttcgctcttacatttagaaacaaaaggaaaatcggaaaaatcgataacggcgcattatgccacaatagtgttaagagatcgcggggagttttgagcgttattcgagctatacccgttattctgaaacagatattacaccagccgctaatcaatagaataattcattctggtactctgaatgacaaaacgatatcgtgatttaattttatgcggaatgtgctttcaaatcaggcaaaaagaagaaaataagagaaatcaatattggcacactgcaaataaacatattagggattaatgacattacgttcacaataatttcctttttacagttttttcatcaaggatgtaatagtccctatagtgaatataattttgcctaattatccaaatatttgctaatcaataaatcagtaaacttcttagcaataataaagacttatcaaattagtgcgtttataactactcaaaataaatacaatctgttaataagttatactcattcaatatt

SEQ ID NO: 35 - DNA, 243072 bp, Photorhabdus luminescens
taattaatggcggagaaggtgatgaccacctgatagcggccacaatgtcgaaattcagccagtttgacggcggtgaaggtcaggatctgctggtgctggggggataccagaacgacttccgggggggcgcaggagtagacagctttgtggtcagtggtcaggtcattgacagtcaggttgatgatatcaatgcggaagatatgattgtttttaacgatattgactggcaaaacctgtggttccagcgcagtggatatgatctggtgttatcagtaaaccgtcatattgaggataaaactgcgcagggcgtctttgaatcaacagggtctcctgtacgggaaaccatctgaccttccggggtgtaattcacgccaaaaatatccgctaaggtcgtctccgcgtttacaccggctaatcggcccagcagcttattcttaagctgacgcggcaaatcctgtggatgataggtaaacgtggtcttcgccatacccgtgccgaatattgctgcgtcatcaggccaaacaacgaacccaggttgggtatccaaaatcgactgaatattatcaccgaacatcaggttccagttacccgtggtcacctgaatatccgctccccggccacctaccgcaaagttgaatgccagtttctcattgacctgacggaatttattcgcgcggctcattgtgcccatatcactcacattgcgggtgagccactggttgaattttttattcaacgtcacttcaatatcttgcttcaaaccacggctactacgggcatgctgtgaatccagatcaaccagcgttttatagtccacgctgctggtctggtccaaaccggacagatccagcacaaattttttcgcaccggcgagggtccattgctgatcttgcgccgccagccactcctgcttttcaccaaaatgagcaataccttgcaagaccccggaaatacgggcggtaccatcaaacggattaaccagcggcggcgttggcagagatttatccatcatcacaatcaggtcattactgcgcccctgattgaaactgatgttacggttgccaataaacatctgcaccccttcaagcgcctgataaccggcaatatcgacgcggtgtttactgtcgccattgccgatgtgcaccatcacattattatccccgaaagccagtgacttaaagccccccataccgactttgacgcccacattcgaggttccccaattgagcgcggtgaattcgccattccccacacccacctgaatattacccgagtaacttagccggttattcgagatatcacttgaatcggtctcaatgctatttttgcgtctctccggcactgtgaaaatatcggtattatccacaaccgcccctctggccggcatctccgcatccgccatgccgacacgcgaaagatggatatcgctttcagcaatatgatgacgcacgcgctctgaacgggtttcaagttcgcctttttcattccaactcaggacgactttgttatcagccagcttatggatccattgatggcgctcatcccgggtaaatttacggccagtcacatcaacgtcaacgtcactacgacgagctgaaaccgtggtgtgaataccctgcgcctttaaggcggtaataaagtgacgggcaaagccatcccgtttgtcatcatttatcaaagaacagcccacaagactaatgtgatcaggtttgtgcgttatgcttttagccaaattagcgtcctgataaaactgcgttaatctggtcgccagttcatcagcggtataaccactcagacgcatgttattttgctctgacgcatcacggccatgaccgacaacttgccaacgcaactgaccggataatcgggcaagatcgccataaaccacacgatatttgccctcagagtcaagttgaaccacgacactggaatccgggtgtttacccgccagattagccgctgctttggcggctacagggtcatcctccatctggataatgatctgaccatcaaaacgagtttcacgaccatcaatttgcggcgtcaccgccaccatctgccagtcatcaaggggtttgctaattttttcaccttgatgatgagtatcgtcgatgatagcaggctttaacgcctcttccttaccagataacccgtccagcgcttccaccgcagggcgatgttgcggtttcacccagacatgtttccgataaagcgcctctgtgtctttaaacgcattatccaacgcctgactgacccaaactttacctttctcaccgacaatatccaccaagtcccgataattgacggtgtagctattcaatatctgcttacgttgtccatcagtggttgcctgtagtgcctgataaaccaccagactttcgttgacagaatgaccaccatcaaataccaaaaatgccagcgtattgagatagccctgctcagccgagaaagtaggctgtttacgagcgatatatttattgaggtgcaccatgacattggtcgagccagacgcgcctgtcaacaccgcgtggccgtgcgctaacccattacgctcaaatgtagtttcccgtccgggggttaagatccgcgccacggcaatatttctgccatacaaaaagtcatcatatttgccattcgcaggctggtggggcagcgccgtaccataatcgttggtcttcatctttccagttacttcaacttcgtacgtgacgttcgccccgacagtcagtttagtaccgagcgaacgggcttcgctgataacatcataataaaaacgatcaccttcaaccttccacgccgccctatccatccccatttcctttgtgcccgccattcttactgccagaaatggtaccttaatcacagcaaaaccatcatcaacctgagtcatcatggtcttgaaattggcaaaagtcggttcgtccagaaacgtcatcaattcaggcactcgactaaaccaggggcgacagtcccgattgatgaccttgacaaaactctccatcgtttcagcaacaatcttctcacgctcggtgacatcaggataacgaccctctacccactgttcaaattgctctaccagaaattgtcctgtctgccgggctgtggtcatagcatcctgtggcgctgttttcaccaattcatcggccaactcagaatcaaaatggcggccaaacaggttgtcgatatattgtcccgtggccttttctttacgggcatccgccagtaactgttgagctaacgtgtgtaattcaggatatgtctgcaactgggtagcggcatcctcaaatagcttaatggtttcctgttgtgtgacttgtccgctaaaccaaaggtttttggcccgctcaactaacggcataccttcggggatcgcttcctgttgcaatcggctaacgaaaacgataaggctgtcactttcagttttaggcgcttcccgctctgccacagagttagtctgagtcaatggcttgatttgtaaatcagtaagacgattaatgtcgctttgcgcgatgtcgcctttcaagcccgccacacgcccaaacccatcaaaggatacctgttggtcaaactgtgcaacatggtcaggtgccaaactaatccccagaaccccgacggattcagctctttttgcctgaaggtaggcaaccagttcccccatttcaaaacgcaggcttttgactaaccgaccacgcttggcaaactcatgaggatcatgctgttgccaatgagcaagcgcttgctcaagctgcaacacatgctgttcatcaggttgttcgaccgcattgttgaaagcctcacgtactccctctagcgccttactgggccgatcggtatttatctgaccaaaatatcttttcgttgaatcaataaaccgtttgtcatcctgactcagcaagaaaggctcaaactctctcaggatggaaaaatgggatttaaggctatctccacccgtaatttgccctaatccttgcaaattgatacccgacattacaggtgcttttgcgattaattttctgggttgatttgagataggttccacaaccctagtgtatgacgttccgctaaacagagaaatgaccgaagcaccggcattttttgcacgaattcccgcgttgatctgcaaccggctaacagcttgtttcgcactcgccaacgcctgccattcatcttcggtcagcccctgataatatcggtttcccgcttccggcattgattccggatcgatatgactgccggtttctcccgcccctgttgactcataggctttttcttctgacaagccgctgccacttgcaccactgcgaacaggcttggcattactcaacttcgctcctttagcatccgcctgggtttgagccactttactttccgccgccgcaatatcacgctgaccccgattttctgcattctgatacgcgatattggcgttatccttcgccttttccgcctgctgctgttgcaaaagtgcttctttttttctctgctctgcttttaattgcgcctctacaccatcaagaatagccttatcacgattttgtttacctttttccgttccggctgctgatagcaccacggtatcttttactttttgctgtatatcaatagcatcccgatggatatccaccagccgtttttctaatgtcggcttaatatcatccaatcgtttctggatgtcctcagcgattccactcgcatagtcgagataatggttctctaactcacgactcccatcagttttgtctttaagtgctttaaatttgtccgcgagtaaagtcagctcttccgtcactgcctgagcttcttcttttatcgccgctcgctgcacttgcccattctggttaagtgctgcctgatttgttgattctaatcgggattgcgatttcgccatcgcggccagttgcttctctttttcttgttctagaagctggcgatctttttccgctttttctttatcgtttaatgcattttgtgccgctttaccctgtttcgcgtgttcgataacagccttagtgagtcgtgagctcttagatttagcaacaatattatcgagaatataacctgtaccatcatcctcaccggttcctttaaactcaatgcggttactacctgtttttgctgttagctccagtgttttattttgccatttcgcggcaccgtcaaaagccgagaatacaagttttccattccataaaacctccatgccactgtcggtaagagcagcatggagactattggcaaaatcaaaactcagtgaaatcacctcgccttcagacaagttttgcagatcctgataaatcgtggtgtttctctccacatcaagttcactgacgcgctcgccatatccctctgtttcaaggacataaatactggctgggtgatatgcttcaataccatgagtggccaaccaacccaactcaccttgttcaaaatcaccattgatgatcagattaatttcctgttccgaatcatcgctttcattaatattcaatgaatgatgaatattttcgagatcaggcgtttcggccgcggtgacagaaccaagcaaacgattgctcaaatttgaacttactggcgcaatttcatctatatggaaaccctcaatagcagaaacttccgctaaatgaatcgcccctctgcctttatgagtgcccgacgtgttagtttcctcccccttcaccagatagttgatcgcctgactgcccatcacaccgagtgcagtttgtttgatattgttgaagaaagcggccagtttgttgctttctgtattactcgcggcaaccgccaggctgtaaaaatcaccctcacctatcttaatcgccacattattgcgcgcataagaagcattaaccgctaaaccctgacccacctgaatattggcgttactctggcctttcatgaccgccacattcaggccattgcccactttggtattgacgttatatttaccccacgccacattaaccgaaatacccttacccacatgggtgttaatattcgcgtcgccctgcgcggcggtaacatttaaaccgttgcctattgtcgtggtcacgttagctgtccctttcgccgccgtcacctgcacaccgtctcccactttggtgacaatattgccttcgctccataaggcattaaagctatctccctgacctacctgagtgattatgttggccttgcctttcgccagcactacattgcgcccgtcaccaactttagtgacaacattggctttgccccaggcaccggtataatcgtcaccgttacccacatgggtgataatgttggcatccccctgcactaccgtgacttcccgtcccatccccactttagttacgaagttggcttgacctttcgtaaaagcgtaatggtcgccatttcccacctgcgtcaggatattcgcttccccccaagccgcatttacgccggtaccattaccaatctgcgtgatgatattggcttttcctttggcaaaccccactgtcgtgccctcaccaacatgggtcatcacgttacccactttggaaatcagcaggccaactgtggtaccgtcgcccactttggtcagaatattgcctttgccaaacaggatactggcggttgccgcattgccaacatgcgtaataacgttcgccttcaccgtggcaacaacccccataaaatcattacccaccttggtaacgatattggcctcacccagtgctaacacgccggttaaaccctcccccacatgagtcattatattggcccgaccaaacatggccgccagcgttgtcccctcacccactttggtcatgacattcagttcaccggcaaacaaaccgatactggggccattacccacatgggaatagatattggctttccctatcattaaagcggctgtctggtcgttaccgactttggtcagcacattggccccgccaatcagggccgcaaaggtattgccctccccgacatgggtaaagagattggctttaccgatcatcgccgccaaggtcataccattacccacttttgtggcgatattgccttctgcctgcatcagtgcaacgctggtgccatccccaatatgcgtaaacacattgcccgccgcgaccatcaatgccagcgcatcaccgtcacccactttggtaaagacgttcactgcaccgcccattagcgcccaaacatcccctttgccgacatgggtaaacaggttgccagtaccagtcaaggctgcgatagatgtcccctccccaactttagtgaagatattgcctgccgcagccatcacgcccagcgtcaaaccgtcgccgacatgggtcaacacgttgcctatgccgaacataatgccggtcgagtcgccactcccgactttagtcaagatattcgcgctacccagcataacgcccgtggtattgccgtccccgatatgcgtaaggacatttgccccgccgcccatgaccgcccgcgcatggccttttccttttttagtcaggatattggcaccgcccaacgctattgctgtggtgtttgacgtttcagtcccctcactgagatggctgataatattggcaccgccaagcataccggcaaccagactgcccgccccgagcttagtcagtgcgttagcgccacctaacagtacggaggagatgctcccttttcccgcttgagtgatgacgttaaaaccacccttcccggaccagttcccatcaccattacctatctgagtatgcgtgttatatccgcccagcatccgcacccggctgctaccgttgcctttgtggattgagatattgccataagccagcagatgagccaggtattgcccatccccgatacgcacaagaacatttaccgcgccaccggcgtaaacatccatttttccgctcttgccttggtgaaccaagacattggctaaaccggcaccacggaatatcagatcgccctttttacctttttttacaatcacgttggcagcacccgcaccattaaaatgcgtatcaccgaactttgagccatgcaaaataacgttcgccgcccccgctcctgtgaaattaatatctccccgtgtgacatcagatgtaataacgtttccaccacccgcaccgttaaaattaatgtcattactgcttgcagataatttcacaaggtcttgatgatgatattctttgctatgcactaatcgatgggcggtacggcgcactgtattgatgtcatattgaagctggcttaacgtgtaaccggggcagacagaggtatacccgttagcataggaaaactcttcattggctaaatcacccgtatgatcgcctgctttagaccaggctgttgcgatgtatttgaggtgctttgtttcgggatcattggccaactgaacttcaactacttcgatataggatcctatgactttggcatacacataagtattgggttttcggttcgatttgactgcggaaacatcgacttttccctgatcagaaaagacgacatacccctccattttggcatcgcctagcgagatatcctccgctttaaccatcacgccacccgcataggttacccactgatctgacaacaggttttcctcgatagcatggatcgtgacgggttgcagacgctcaaagattaaaccggaaagatgataagcgccatcaacgtttatcgcgataaatccattgcctgacgaaatttctttcgccgcaagattttcaaggtgattgcccgctttataccaggaagtggcataataaccgagtttgcccgtaatgggattattttgcagccgaactttgctgattttagtgtacattttgtcagtaaaggcaaaaagataggtattcggttcgacggttgatttcatccctgtgacttactgggactcttcgatcccgcgtcctcccatcgttgccgtcgttaatacgatctcttcagctttagcaaattccagtgtctcaccatcgaaatcgctattcgcgtctattctggtgattacattgtaagcccccgcaccggagaaattaatattgccatgcgcgacatcagaatagagctggttataaccgccaacaccttcaaaagtaatatcaccacgggtctgttcatactcgtctttattttggtatacacgctcaattcgattcgatgcccccgcaccacgtaagataatattaccctctttacctttacgtacgatgtgattatcagcaccggccccgttgaatgtaacattaccgcgttctacccgcgaattgatactgtttgcaacaccggcaccattaaatatcacatttccctgtgaatcttgataacggttaaaccaggtacggttaatgtcattgcctgcccctgcaccagcaaaatctaaatttccccggttagtttcatgccataactgattgtatccaccggcccctctaaaacgagtatcaccagacaaccctttacggaccagtttattataaccggccgcacccgaataatttaaatttcccgtttcacccgtgtgatcaatagcagctacaccggcagcccccgtaaatgacagcccgccatttcccgttttatgaataccggtataacctgacactccctttaccgtaaggtcgccatctgtatggtatacatcgactttaaatgaaccaacggtaacatcatcatttccgccataagcataaacttcaccaccagccccaacagcagtaatacgattaccgccattatcgtcgtaatatcttcctgtaaagaggtacactgcacttctattagatgcttttcccatcaaaaatccctttaaatcatacaagagggtatctccccgccctctggctacgccagccgctattcggttacggcgggacatccacttaatgtcaaaaaattcggagtgtttaacgtcaagtttacacactccgataactacttatcccctatctgaaggaagggcctgcgctcagtgctatttgatcaaacaaattgatcaaacaaaaaaccactgtacctgacgaatacagcggttattttgaacatccagcttcccgcggacagtacaagctttctggcctttccacggcaaaaagacacggcggcgcaaatccctggcaacttcacgcccgtgaccaaaaggcgcaatcatttcaggaaaaaagatatgtggacctgagcgccagtctgtgtggataagctctctttctcccgaaagaagctcatctcgattctgctcagataaaaaagcccaattacaaaaggcgattgggtgcccttgtccatctgcatagtagcaaaactgattcagttcaaatgcaggcaagatacgctgttgccactcggacaccaggtatcttcgatgcagaggagaatactggctcagcagcatcactcctccaatcattgcctgaatttctgcggtattcagtttcgctggttgatgtataatcgccatgcgctaatcaaccatgagattttattttgtatttttagataggcgttttttagcgttagccggctcttccactatagattccgatgcaatttgctcttcagccacttgtggcgcgggtaaaaaccctgctgcaactaatttatcaaattcagccgccattcgtggatcttccaacatatttttaaccatagaaaccatatacataaatcctgatgctggcatatggataacttgctttaattcaagttcattatcattttctgccattatcccattcgccatacgattaggttcttgaccaacgaaataaagagaaaaaacacctttattataattaacactagagatggtttgtacgaatttttcagacatatttttatttaccaaaaataaacaacttattaatgaagttatacaatgtatacaacaaagaatacatttgattcacggatatcttgaatttttatatctataaatacattaagagtaaaaaaatcaataaaataatatagagaaaaaacttaaaatcaacatttacacacaaaaagtccttttaccccacatatatagtcccatttacccacatcgataatgacgataaatataagataataagtaacacttaaatgctacacaaaattaatataattacttgttttaattcgtattttgtggattttaaagatattttttcatgaatgaaattgagaaattgactatagcatcattaagattaatattgatgatatataatagaaaagaaaacatcactgacattgataacttaaaaaaatctaattgttactattcatatataagtaatatagaggaaaaatttaatttatcgatttcaagtaaaaattccgtaagcaaaaagcaccataatatacttttacccgcaatcttgtttgataataatggcctaccttttgttttagccaaatcgaataaagagagctcactaatacagagggttgataaagaaaatcctgaaatatggtccgaagaaaggctgataaaagagtggaatggaaaatggattaaaataaaacagaaacaagctaaatttaacatccgttggtttattccagaatttctggcacaaaagaaaaatctatgtgagatactgttattttcctttgtgttacagattcttgcgctaatttctcccttagttattcaagtggtaatggataaggtcttaatccaccaagcgctatcaacacttgatgtattagtctttggcttaatcatcgccggcatcatcgaggtgattttacgtggattacgagaataccaatacgctcacaccgcaaaccgcattgatattaaactgggattaaaactagtccggcatctgttcgggctacctttactcttttttaaatcccgccaagtgggagcgattgttactcgggtgcgtgaactggacaccgttagagaattcctgaccggctcaatgttcaccttatctgtcgatgttctatttatgtttattttcatctacgtgatgagcctgttatccggcctactaacttgggtttttctcgcaaccttccctttttatgccattttggcgtggtgggtgacgcctcgtatggaaaaagcggttgaacaacaattcacccatgcagcaataaatacctcttttctgactgaaacggtctctggtgctgaaaccctgaaaagtctggcggtagagcccaaattcgttcgccgttgggatagccagactgagaagatggtagatactagttttgcagtacagcaactgggtaatcgctcaaaccatattgttatgctactgcaaaaagttaccggtgcggcaattctctggttaggcgcatcagaggttttatcactgcaaatgaccctcggtcagttgatcgccttcaatatgatggtcaaccacacttcccagccattagccaggttggtagaactgtggggacaattcatcagaacacgggtagccgtagataaattaggagatatgttaaacctgccaaccgagcaacaatccggccagcagcaggtagcactgcatggtgcagtttcgtttaacaatattgtctttcgctatcaacctgatattccgccaactatcaaaggactgacccttgatatcagagccggagaagccattggtatcgtaggtacttccggttctgggaaaagcacgctggcacgtttattactccgcctttattccccggaaaccggcgcaatcaccatagatggcattccattgcaaaacatagggatcgaaacactcagacaacaagttggtgtggttctgcaagaaaatttcttatttaataaaacagtatatgaaaatatcgctcagtcgaaacccgatgccagcctagaatcggtgattaaagtcgccaaactggcaggcgctcatgaatttattctcaggctgccgatgggatatgacacaaccattgcagaaggcgggcaatctttatctggtggtcagcgtcagcgactggctattgcccggactctcctcgctgaccccaaaatcctcattcttgatgaagcaaccagtgcgcttgatgacgagtcacaatcacgcattcaatcaaatatggcagaaattgcccaaggcagaacggttatcaccatcgcacaccgcctttcaactgtacgtcattgtgatcgcatcattgttcttaaacagggggaaattctcgaacaaggctctcatgaacagctacttaaccacggtagacagtaccggaagctctggcagttacaacaagaattaaaacaggagatgccttgtcatgattaaagcgtttaagaataaaattaaaacctggttgcgcccttgtccgcagcactatgactttttaccgacacatttagcattgtcacaacgaccaccgtcaccttttgcccgctacactgcaatcacgctcagtatcggcattatcatggccttgctctgggcctatctgggtaagttggatgttcaggcaaccgcaaccggtcgcctgattgtctctggccgttctcagataattcaggcatacgaacagagccgggtgaccgctatccatgttcagaatgggcagcgggtagagaaagacgccccactgctgacactcaacacactcggtgttaaccaagatatcacccggttattaaagcagatcgaatatcaagcccacgaaaaaattcgttatcaagctttgacagaagagcaggaaccgacaaaacaggagctgtttcaggctttgccggtatctcaacaaacacaagttgctgacaactattcccgggagaaaagagaatacgaagcggttgtaacaaatctgaaagcagagatgaacgtcaatctctcttctcaacaatcacgaaaaagcgatatcaatgcgctcactaagctccgacaaaatatcagccagcgtttaaaagcacgtcaaaccttaagtcaaaaacaagtgatcagtaaagttgaatatcttgaacaggaaaaagagtttctggaaacagaacgcctgattgcccaacaaaatgcggagtttcatgttctgcaatcgcaatatattagcctggaagagcgcttaaacagcctgaaaacacaaaaagagcgcgaatggtttgataaaagaaaacaggccgaagttcaattggtcgttttagagcaagagctggcaaaagctcaggtacgggaacaacttgaagtcattcgctcccccgtcacaggaacagttcaacaactcagcgtccatacattaggcgcggtactgcaaccagcacaaaacttgatggtgatcgtccctgatgacaatgtgcagttggcggaagtgcaaattttaaacaaagacgccgggtttgtttattcggggcaacaagtcaccattaaggtcgatgctttcccttatacacgttatggcacgattgacggcgaactgttgagtatatccagagattcaaccaccgatgaacagctaggattggtctttcctgctcaagtgagccttaaacgtaatagcattgccatagacgatacccaggttgaaattaccccaggaatgtcaatcgtcgctgaaatcaaaaccgaccaacgccgcgttatcgattatctcttgagccctatcagagagtatcaatctgaagcattgagggagaaataatcgtgaacctattaccttcttctgctactgactccagtaactacactcataatcaggcgctgaattgcatcgtctatgtggggaaacaatttcataagtcagctactgtcgatcaacttcaacacagcctgggttttgactccttatatctgagtgaactacagctgcgtgaagccgccaacgctattgggctacacagtaaaattgagcgattaactgtcaacacagggccaacattacccttaccggcattgattgagctggaacaacggtggtgggtactcattgaagtcgagaatgacaatattaccattctcgatcctgtgactgaacaaactcaatcgctttccctatctacatctacgggtaataaagagaatgtatataagattcttttaatcgcagatcaggaattaactaagaagcatgtcaaattcggcttgagctggttttatccctccattttccgccagaaaagtcagataagagatctgtttttgtttgccatggttctccagttatttgcactggccagtccgatcttgtttgaaaacatcatcgataaggtattagtaggacgaagtttatctagcctgcatgtattaggtatggctatgctcgctatcgcccttgccgaacccttgtatagctttatgcgcaacaccgtgtttgggcacatggcaagccagataaattccgagctctccgggcgactgtatcgtcatctggcaggattgccgctgcaatattttaagcaacggcaaacagggcagatcattgccagagtcagagagatgtctcaaatccgccagtttctgacaggttctaccctgatgctgttgctggatttaattttcgtcatcatgtttattggcatcatgttttattatgcctggatactaacctggattgttattggctcactttttgtttacttcatattctgggtagtcgccgggccggttattcgccgcaaagtagaagcagaatatgaaaccgatgcaaatgcaacaagctttctgactgaagccgtcactgggattgaaaccatcaaaaccaccgctactgaaaaccgtttcttacatcagtggcagcgtattctcagccaacagttgactaaaagcttcgcggcacagaaaagcggtttaatcgcaggacagggaatcgattttgtccagaaatttacctccgcgatcctcctatggtggggggtgaccgaagtcttacgcggtgaactgactccggggcaacttatcgccttcaatatgctggccggacacgtcacgcaacctatcctccggctggcacaggtttggcaggattttcagcatacgttaatcgcgttgaaacgtgtgggggatattcttgatgagccaatggaaaacagtaaacagggattggcttctgtacctgagctggaaggccaaattgaattcaaaaatattcgcttccgctaccatgacgatacaccggaagttctggcgaacctgtcgttattgataaaatcgggtcaatttattggtataactggaccgtccggttcaggtaaaagtactctcacccgtttgctacaaaggttatacgtacctcaacatggacaagttttgattgatggcatggatttagctattgctgatcccgtctctttacgccgcaatatgagtgttgtgctccaggaaagtatcctgttttctggcagcatcaccgataacattcggctgtgtaagcccaacgcaacagatgcagaagtctatcgtgccgctgagttagccggggccattgaatttattcaatcccttcctcacggttttgcgcatccagttggggagaaaggagtcaatctttcaggtggtcaaagacagagaatcgcattagcaagagcgctcttggtcaacccaaccatcctgatccttgatgaagctacctcagcattggactatgaatctgaagcggcaatcatggcaaatatggacgaaatatgccgtaaccgaacagtgatcagtattgctcacaggctcaatacaattcgccacgcggataaaatctgtgtgttagatcaggggcaaattatcgaatttggctcacatgaccaattgctccagcaaggcggcttatacgcgcatctgtggcatcaacaaattggcgaaaactaaatggcaattcagccaattcttaacaaagacggaataagttttggctgaaattattttttattttacttgtttgttcaaaaaaaataactcaatgtaattaaattattcaaattgttacaataagttattaagatgttagataatgaaatatcttgatacatcttaatttttaagttggagaattcttatggacaggaatccagtttctttaagcgtgttagtattttcaggaggatctctgacttctatcactggcccaatagaaattttaaccactgccgctcgtttagccggagcgccggagccagaaatcaatattgtcacacaggataatcaggacgctgtcgggatgggtggtgttcggctaaaacccaataaactcataggagaaataaaacaaacagatattgtcctggtgggttcaattggggccccttattgcgatttcgatctttgtactcaagaaaccttagattggctccagatgatggaagaaaaaaatgttcttatcgtctccgtttgtacaggctcttttgtactggctaaagctaatttactcaataaccgcaaagccaccacacactggctatttaccaaattatttaaggacatgtttccgcaagtacagttacattcagaaataaaagtcaccagcgataacaatattttttgtacttctggtacctatgaatacaacgatgtcatgatgcatattattgaacagatatatggtcaaaataccagggaaacctgtagtcagctcatatttggtaatatggaaggcctcccctctcatactctcgcaagttttgtaccctatcgccaacattcagatacattaatccacaaactacaagactggatgcattctgccccatcagacagattatcggttggcaatttggccgataaaattcatctgtgtgaaaggcaaatgaagcggcgctttaagactgcaaccggccagacaccgattcaatatatccaacagattcgactatctctggcgaaatgccggttagaaaaatcgaataagaccatagaagaaatcagccatgaagttggttatgaagatactcgctatttcagagagttattcaagaaacttaatgggttaacaccaatagagtaccgtagaaaataccaacaccgctaaaacggaaactcaagcataatcctttacagataagcaatgacgccgcttttatctttgtcaggcagtagcgatacactagaagctggggtatcatggcgtgctatattttatggtatacgccctttactaattgaatttatggcaaaagaacaaatggatcgcaccactctggatttgttcgcaaatgaacgcagaccggggcgcccaaaaaccaacccactttccagggatgaacaactcagagtcaacaagcgtaaccaacttcgccgtgataaggtgcgtggtctgcgtcgtgtggagctgaaaataaatgctgatgcagtagacgcacttaactttcttgcacagcaacgcaacatcagccgcagtgaactcattgagcaaattttgctggcccagttagcagaaagtaacaccacgacttgatagcattgaaggcacgaaatcacacaaatttgacagaattgtcctgactgtttagtcagaataggattttgcttttttattaatacaatcagaaccttttttactgatttttaacattttatacgtatatctcatacagaaatacacaaataaaacaagaggttatattatcctatggcaattataggtatattttttggcagcgataccggcaacacggaaaatattgccaaaaagatccaaaaaattctgggttccgacattgcagaagttcatgatattgccaagagcagcaaagaagatatcgaacagttcgatattctattgctcggcatccccacctggtactacggtgaagcacagtgtgactgggatgatttcttccctactctggaagagatcgattttgaagggaagttggtcgctctttttggttgtggtgatcaggaagattacgcggaatatttctgcgatgctatgggaaccatccgtgacattattgaaccccgcggtgccattattgttggtcattggccaaccgagggctatcacttcgaagaatcaaaaggtctggctgatgatagccactttattgggcttgctattgatgaagaccgccaaccagaattaacagaagagcgtgttaatgcctggactaaacagatctacgaagagctgagtttgtcagaaattcttgcaggatagcggcctatcccagtaagcgtaattggtgcaggccatttcttatcaatagtgaacccacggtaggtgagaagtgactcgcttcactcaccctgtgggatcgcattcaaaggctattacttttgtcaaaacacggcttaaatccgctttttattaccaagaatggcaaaaaatagcctaaacatgataaatagtaaggttattcctgcgttttataaacgattattctggcaaaatgtgtaatgaaagttaaggttaacgtggttttcattttcattagccatgcctataatcataatctgataactaactggtactttttgcagtatcactaagttcactttactgagtaacaggactgaatccgcatgaccgacaacaataaggcattaaaagatgctggacttaaagttacacttcctcgtctgaaaatattggaagtgttacaggagcctgaataccaccatgtcagtgcggaagatctctacaagaaactgattgataacggtgaagagattggacttgctactgtctaccgcgtgttgaatcagtttgatgatgccggtattgtcacccgtcataactttgagggtggcaaatcggtttttgaactcactcaacaacaccaccacgaccatttaatctgcctggactgtggtagagtcattgaattcagtgacaaatatatcgaaagacgccagaagaacattgctgagcgttatgggattaaactttcaaaccacagtctttatttatatggtcactgctctgccggtaattgccgcgaagatagtagtgcacatgacgagaagtaattcactcctgagtttttatccacctagagaggggaacccgccagggttcccctaaaggggctatattttcaggttgattcgggcctgtcaaaaatgagctataagccaagctctgagtgagagccaagacggacaaggcacaatgtgtccgcatcgggtttctgataaatcagtatcaagtcaggcttgatatgacaatctcgaaaatccttccaatcaccagaaagagcatgatcgcaatatttcggctctagcaaactatcagaagctaataattcaatcatcagcatcagtacgtcatcaagaacttcacgatgccgacctttcttttctctcttgtaatctcgcttgaattggcttgcgtagtcaatcgtccgcattaagatcagccattaaatcttttacagtggagaatgatttaccgcaacctttgcgagcttctttcattgcagctattgttgtctcatttggtactaacggttcaaaaggtaacactttttctcttgctacccgcgttaacatcatgcgaacagcatctgatacagtcaaacccatagcagccagaacagcagctgcctctgtcttaatctctccatcaatacgggtttgtactaattggtttgtagccatataagatctcccattgaattacattgtaatgcaaatgtaattcaatgaatgtctataatcaactttcgctcaatacatgaagaggtaattgaatttcatctattgaaaaatttttacataactaacatcataaatataactgtagtttatccaatttacccatttttcctctgaatctgtagtacgagcctgtcgggcaactcgatatcgagacacaacttgttaccaatcacctcaacgtaatgtttgaaatggcgaggtttttcagaaattagtctcattgaggaacccgccagggttcccctcttgctacaacattatcatgcctttacattatcaattcgactgtaacgtttaccgtccgggctgacagaacggatcaacacatcacctctcactcttgggcgtttatggttgttataaacttcccagttatgaccgccatccgtcgaatactggattaccaatccaggcagagcaacattagcccgcaaaataccccgttttaccttagcccccggaaccggtagacggtaagcaatgcccgctttatccagtttactaagctcacgttgccctatcaggttagcgaaccgggtccagtcacgattaagcgcatctatatcgactttatacgtttctccacgcttatatacctggcccggaatataatccaactcccaaccggcccggtgccatgcccgttccgctagcggcaacaagcgcggataaatcatatattccatctgctcatcagtccgaaccgtttcactccatccttgacctgaaagcccataggcacccggccacggtttatcacttttcgcactgaatgcattaccatcacggtcaacggaagtttcagcattttgcggtatgttattgggcgcaaaactaaagatcttagcttcatcgttaaaacgagccgcccaataatagccacgttcttgtggatgaacttcatatggcatatccagataaatataatctgggctagatatcaccacgtcatagcccttattcgcccaatcattgactgaatcaaagccgccatcgtagagagtgtcccaaaaattcaccccaacgcgtttggtggcaaaatctttagcactgctagcatgttttaaaccatcctgccatgcctgcatcctctcgataccattagcattcacaattttgctcacttcaattgcgaagtcgctggcaagatgatcaatgtctttcacaacaccctgttctatcaacttctgacaaatctgagacttagcccacggtttatcttccgcacttttatcaatgatgcccttacccggtacgataggaccatttttatcctggaatccgtctcccaaacggatattcttcgcttcatctcccccaaaatgccaagtctccaatggtgaacctgctactttatgcatagcagcaatttcacctatgactttctcaacaaaccgttttgaagaatccatacacgggttcaaataactgcggcgatcatagagctgaaccgatgttgctctggtggtatccgttggatcgagcaaacgatattcactcgcccctttcacattcccctgagcaattaattttttatagcgggcttccatagaaacaaccgcggcacgagcatgggctggcatatcaatttcaggaataacgtcgatataacgagctttagcatatttcagaatatcaatgtaatcttgacggctgaaatatccgctccccatgttgttgttatcggggcctgaacccaattgtggtaataaacattgagtttcacttaaatcatgacaccgctggctgccaacttccgtcaactcaggtaatccaggaatttccaaacgccaaccttcatcatcagacagatgaatatggagtttattcagtttgtaacttgccatttggtcaagcaaacgcagaacagcctgtttactgtggaaattacgccctacatcaaggagtgcaccacgatattcaaagcggggcgcatcttttgccgtcaaagtagcaatcttcctatcgccatcaacaggaattaatgacaacagagattgaagaccgtaaaacaccccagattggtcaaaagcaacaatttgtgccccattctgggtcacattcagacggtaagcccctttaacctgccaatcgccaggaaactctgaagagataatctgggtcgcaactgaataaccactatcctctaatttaatgccttgatcagtaaaacgttttctgacaagaataactgcctcgtcatttaaaccacccaattccagtctcaccccgccagataaatcagcatcctcgggaaaaatctgaacctcttttggtgtcgggataatttgcccacgcaacttctctgatccaacctttttgacctgcaaattcttcatataacgattttcaggcgtcatcaaaatattgttatctgtctgtgtgcgtttccactgatcatcggtgaaagcagataagaattgacttagatcttctgtatccgtactaacaagcactttaggcttcgcatcacccgacgttgcataccagcgaggtagaaaatcagtgctgtaaatctgccagtattctccaataaacggcagttttacctgctcattagctttaataccggtgaatttttcggttggctccagtctatgtaaatcgcccgtaatacgcgtgattttaaactgttcattatccacgctcaggacctgacgaatactgtggaaataaatcgcccagtcaatagagtcaatcgcctgattaccattggttaaagtaatatccactcgattacatttagcccaatctgcccccagtaccgcacagttaacgccgtgatctcctgcctgattatcaacaactttataattaacttttaattgactcagtgcatcaaccacttgctgcgctgtttgggaagcatatgcagaacccataagtccaacagttgcagtcagtgctgctaatgtatgcaatttaaatttcttcattattacctctttcaaacacaaaagttatgtaaggtaagccactgctcataggcactaagagcagcaacaacgagccatgagaagacaatagacggcatgatgacgttgaatttaatcgctttctcgttttggaaaaaaaatgccaatctttacgccatatgtaaccataaaattactgccaaaaatgtaaatagatttacaaaataaaaaacattacattaagaaagaaaattaaaatcatctaatcgacatctataaagattatttttcgcaccacaaattatcaatagtgaaaaaaggattttttgtaaaacatgacagagaacacattaaaaaataacgagatagaagttatacacctcattgatataaaaatagaaataatacaaaaacgaaagattaacactataagaaaatactagaaaacagatcgattaatacaaatactttctaactaaaatagatataaaattatttaccaatgataatatttaaaaaaataaactaccaattgtgatttgtttttctattatagagaatcattaaatgatcaaagtttaactgaataaaaaattcaataattgagatgaaattaatatatatataccaccgggatattgctaataacatctatcccggtgaaaacattatctgtttttaaatacaatctataaaacctacacttacttaaattcaaagctcttcacgaacagcaagacctaagttttgcaacattggggcattctcacatgcaatatagaatacttcattaatagcactactattgacatgttgatgccatgcccatacaggaacatatatcgcatcaccggctttccatgaaatatgttgttcaccaatgagtgaatacccctccccattaacgatatatattatagtttcataactgtgtctgtgtttacgggtcgattgtccaggttgtaaccctcccagagtcatactgagaactttactaggtaaattaaccatagccactttatggcgcctttcatttgagaaattcaaatcttgactcacttcagagttcaatacattttcatgaatcaattgagtaggcttatcttcaattaattctccgggaactttaccaaagtctccagatgagaaaaacgtttttttcactataattacctctaatattgtagttcattgtaaagtttgtattttttaaccatcttgaaataatactcaacatattttatcttagttaccatttcggcctatcttatctaattatcctagcaataccatgtcatatgctggtaatttctgacaaacgcacaaaaagtgccatcaaaattaccgataagtttttttataatattaactgcatcattctacgtaataacagtggtggttgaactatattatcgttctatatccgttatctttcaagttgcctctttgttggctacactcgctcaccccggtcacatcgttatctatacccgtcatctttcaaactgcctctttgttggctgcactcactcaccccggtcacatagttagctatgctcccggggattcactcccttgccgtcgcgatgcatcttgaaatccattgggtatatacactttccacaagcgcgcttttcttaatgtgctaacaccaaaccccaataatatttcgactgctcgctgacttttttatatgcgcaccagatgtattagttaaccattatattattaaccctatttcattagcgttaatatcttcatcccagaaaatcatcccttacttacctaccgacaattttatccaaaattgaacttatgttgtcaggaaccctatcacctctccaagcaatatattggtcaggacgcactaaaaggagcctggtttgatataattgccaagcatcatgaccgggaagatcaataatcttgaccggaattttacgttgatatgcctgagctaataattcagatatatcgggaaaatgagatcctacccgaagcaaactaaacccggagcctaaaatatcgaacagagatactttagtgccagaaataggtgtgagccataagtgcggcaatctccctccgggtacactacttggtttataattaagccaatcatcatccggtacgggatcgctattaataatatgagaagaactatcatatcgggcaccaagttccacaccgatagaagtaaattgacagagaaaatgacttaactcaatattaatcttttcacgcgccagatcacccgcataatccgcatcctctaaatttgcaggcacatatagtgatgctgtctgccgtgtataagaacgtgcagcggcagtatttctccatgcaattggacgacgctcgctttcataagaatccattaacgcattacctgcccagccatttatagacgcaacaattttccaagctaaattgctagcatcgtcgatccctgtatgcataccaaaaccaccggtgggagcaaataagtgaatagaatctcctgctaaatataccctaccctcagaatatttatcagcaacgagagcaacaccgcctttccatatcgtattgccaaggactaatacctcagcatctgaacctattcctgcctgcgctatgcgaacgacttccaaatcatcgataactttcccatccttactctgagtcacaaataaaaaatcatctttaccgtccaggcagataaataacatattttccctaggtgaaataatattgtatatccaggattttttgtctcgtaataatccctggtgaattccaggaacacggatataactggaaaccattccacccgttagaaaacctgccttagcttcaacggttccttcgtaaactataccaagcttagatcgaacaaagctctgtccgccatcacacccaaccatatatgcagcttgccaaacttcatctgcatactttccatcaatatgctccgcataaagttttacttcatctttatactggacaaaatctttaacgcgccagccatatcttattgtaatatttggacgactctttgcatgttgtagtagaaacctttcaacatacatttgatttgcacgtattatgggttctggaacgggatctgtcgaagccgcattttcgcgcatagacattttctccatttccgacggtaacgtaatccgtgcaagctcccatccattaaacttggtaaaatatgatacgtccaaagggaactcttttggcacgcctaatgaccgaataggctgagatatgcctacacgacgaaaatgctccataatacgggcactatgggtactgcctttaggctgccatcgggtctcttcttccaaattaaagataacggaacgaacaccatataaatccaaaaataaagccaacattagaccaacgggtccaccaccaacgatggcaacaggtgatacagaaatattttccgaagtcaaaatatactctccttaataatgattaatagcaataaatatttcagaccaaatatacccgttatctttcaagttgcctctttgttggctgcactctctcaccccggtcacagagttatctatgctcccggggattcgctcccttgccgtcgcgatacatcttgaaatccatagggtatatattaattaaaaaatttatatatctgtgaattatctccttttcctcgctcctcatataaaacaaaatagttataaccatgttctatgtatcattcactaaacaccgtttcatttccctggcagttaagctccacaactctttttcctgagtaattgtgatactttctcacttctttaaggaaacgcttatatatccgttatctttcaagaataaataaaaatgagagctcaaaaaaataacatcaaaaatttcactattttttaatatttaaaataaatcatcatatccaacagaaacgaattcatttatcttatatcacactacactaaacaaggtattctttatcgtttccttaatgtaataaacaatattctgataatatccctctcatactgtcataacaataatatacccgttatctttcaagttgcttctttgttggctgcactccctcaccccggtcacatagttatctatgctcccggggattcgctcccttgccgccgcgatgcatcttgaaatccattgggtataactcttacgtcgtagcttaattctaaaaaagaggtatcctaaattcttagtaaaaataccggtgaactgaaagtgagttggtgggaacacatctttgtgaatgttaaagaaccactccatgcgttcaaactcagagacatcgggagattcagcaagaatcaatctttttataattgcaataaccgtattttcataaaaacctccattcacaatattttaccttcgccataattaactctaattactggatgtatatacccgttatctttcaagttgcctctttgttggctgcactctctcacccccggtcacagagttatctatgctcccggggattcgctcccttgccgtcgcgatccatcttgaaatccatagagcataattaacaatttctaaaatcccatctggaaatttttatttctttcatatttatcgagaatttcaggagaaatatcacttacttaggttttagaactttacctattgccatcgaagaaatttgaccgaaactattcacaacaacgacatattctctaatatagtatttcttctcgaccttttccaatattagttgaataatttattgtccaacaatatttacatctaaatttaactttccattcaatagaatcaataattactaatttcgtttttttatttttgacatcatacgagttcaatccaataattattacattatatatgattacgatcgtttgtattacttattttgccaaaaatatccccaccaacgctttatgctgatatttcatcactagaaactatatcaagtacctttgctgtacatgtcattatgtacacaaagtatctcaatcacactcggataaaagcatcgttacatctgtatttgtcctgatattgctttgatacagttcattaagcatcccaatgcgaaaacgcaccatttcttcaccaaccgcaataacatccccccttcggtaaggtttctcttcaatcattcgatcaataatttttctcatcgcaattgcatgatcttcatcctcttcaacatggattctaaagaaatgtaatgcatcatcaggtgcctttattaattgcaaggcatctaaaattgggccataaactaaaggtacgatcgcctcagcacctaaacacagtgccgcaagccctcttagagaatcatcactgcggcagtggcgaaacatggcatcaatcagttgttgagtactgttaagaatcgggtcacttttaggaacagcgttaatagccgtcatcgcttttttatataactttgcatgagatatctttgctgcatcggttcctgttagctcttccaacagattatgagaaagcagcataaaatctttttgatctgctaaacctcccatcaatgaacacagataacgggtgaaatattgtgaatagtaatggtgctggatcataaactttcttaataaattctggtccgcctctccagaacggcaagcgaccaaaaatatattcgaattaagctcctccaataacactttagagaaaacatcttgccataatggagataaaaaataaccggcctcttctttaagctcgttttgagtattgatagtgagttccataataaacccttttagtaacattcaaccgatgaaatagatgatatacaagctcttctcaagccaaaaatattagttctatgtttatgcaaccctatcaatctcttaacagagattgctgtaaagccgtaggtaagaatatagatattaatgctccaactcagttctactgtgcactgtattcaaagggataaacgcggcaacaagaccagcagtcaggacaagtgaaattttatttacgttcgatcctatgtctattttggttttcatgaccatttcaattttctttcagccttgaatctgtatggctttccgctatatagcagccaaataaagataaattttatttcatactacagattcgctaatagtgaataaatagacctaaaatcacttctgaagtgactttcttgtcaccaatagtgacctaataaaaatcccaagaggcccaaatgaataatttgagtggattcatgatcttcatccatgtcgccgaagctcgtagttttgcaaccgcagcccggcaactcggactctctccttcgtccgttagcaaaagcatatcccgattagaggacaaattaggtgtccgcctgctccaacgtagcacccgtagtgtcagtttgacggcggaaggcacactgttccttgagcgctgtaaacgcatcctggacgagatttccactgcggaacatgaactattaagctctatctctgcccctcaaggccgcctgcgagtaagtttgccattgctcagtaacctgatgttacccgtattatctgcttttgtgacttgttacccacagatagagctggaactggattttagtgatcgattagttgatgttatcgatgaaggcttcgacgccgtggttcgcaccggggaactcaacgattcacgactcatgaataaacgtatagggtctagccgttttatctatgttggcgctccaagttactttgcacaacacggtaaaccatcacaccccagagagttactacaccacgcctgcttgatgcatcgttttcccactaccggccttttagagaaatggccgctatgcttaggaagatccgaaatagacatacatcttcaagcaaagataaccagcaatcatgtcgaaacactgctacacatggcgattcaaggccacggcatagcctgtttgcctgattttaccgttaaacaagcattagctagcggtacattgttaacaatcttggataagtgggcgggtacttcaagcaccttccgtgttctctggccatctaaccgttgggtactacctaaagtcagagcttttgtcgattttatggcagataatttattcccaaaagagaaatgaaaatgcccataaatgacataattaatctctttgactttattctgtaattccgacacctcgtttatccatgactcaatcttctctagtaatgacaaatttagccataaaaaaactgcacctcaatgctggattaagtgtccaacttgtgaggtacagttcattatctcaattaatcctgagaaatttttgcccaagtatcacgcaggccagcggtacggttaaataccagattttctgcactggaatgacaactatcagcacagaaataaccttcacgctcaaactgataagtttgttctgatttagcatcagctaaacttggctcaacaaagccctgacggatcaccagtgattctgggttgattgtcgccagaaaatcatcctccgcacctgggttcggcacgcagaacagacgatcatacagacggaattcagcagcaaccgcatgaaccgcactaacccaatgaataacacctttcactttccgaccatccgctggatctttattcaacgtttgatcatcgtagctgcaatagattgtcgtgatattatcgtcagcatctttctcaacgcgctccgctttaatgatataagcgttacgcagacgaacttctttacccaataccagacgcttatattgacgattcgcctcttcacggaaatctgctcggtcaatatagatctcacgactaaatggcacttcacggctgcccatctccggtttgttcggatgattaggcatactcaaaatctgctccccttctggcatgttttcgatcactaatctgaccggatcaagaacagccattgcgcgaggcgcattttcgttcagatcatcacggatacaagattccaatgctgccatttccacattattatcctgcttggtgacaccaatacgacgacagaattcacgaatagacgcggcagtataaccacgacgacgcaagcctgagatcgttggcatacgtgggtcatcccaaccttcaacaatcttatctgccaccagcagattcagcttacgcttagacataaccgtatattcaaggttcaaacgcgagaattcatattggcgtggacgacaatcaatggtgatattttccagcacccagtcgtacaggcggcggttatcctggaactccagcgtacacagcgaatgtgtaataccttcaagcgcatcagaaatacagtgagtaaaatcgtacattgggtagatgcaccatttgttaccacactgatgatgctctgcaaatttaatccggtacaaaaccggatcacgcatcacaataaaaggggatgccatatcaattttagcgcgcagacaagctttaccttcgtcaaattcaccggcacgcattttttcgaacaacaccaagttttcttcaatagtgcggtcacgatatgggctatttttgcccggctcttttaacgtaccacgatattcacggatctcttctggactcaattgatcaacataagccagacctttgttgatcaattcaatagcatactgatacagcgtatcgaaataattagaagagtagcgaatatcaccgctccactcaaaacctaaccactgaacatcatttttaatagaatcgacgtattcaacatcttccttaactggattggtatcatcaaagcgcagattacactgcccctgatagtcctttgcaacaccgaagttcaaacagatagattttgcatgaccaatatgcagataaccattgggttcaggcgggaaacgagtatgtaccgatgtatgtttaccagttgccaaatcttcgtcaattatctgacgaataaagtttgtcgggcgggcgtctgcctcactcattgttttatacctcaataatgccaaaaacgcgtcacataaccgcctataatccaacaagcagtgccgagaaacaaccatttgttcgtgtaaaatggcgattcagtacaaagttggagcgaaaaaacactcaacagtagcacatgtcaacaatacagctcgctttattataattatccgtgaaaacaaaggaacattgagtaagttatgataatgaaataacccgtaagactggtttttaacccatatttcattcaaccataacaaatattacctaataacaatcatccaattttaaaaaataaataattgatactatatctattaccaatgactatttgataaaattaaaataagtctataatttaaatttccaaattatctattgattgatgtttttactctgtaaatataaacaaataattatatatatcaaatttattattaaaacactatttatgatgttctaaattgaaatttatataaaaaatacaaaataataataagttaattttagaatcaattcgataattcaactattttactaccggattttagcaaaattacactgccattctaataggtatttatttaaaaataaatttacaatcatgctaataaaataaatctattcttgtctgtacatcacgctatatacccaatagatttcaagatgcatcgcggcggcaagggagcgaatccccgggagcatagataacgatgtgaccggggtgagtgagtgcagccaacaaagaggcaacttgaaagatgacgggtataaactctttaatttcaaaagcgtgttttgaagcaacatcttcccgcgattaacttattaagttaattcagttaaaaatttgaacccgtttactatttgaacccatttactacagatgactcaatttatgcaattttaaacaatatcgctacagtgatcacaattactcacttatgtgtagctttttattatttttcaactaaaaataagttgtattgctgttattaatggcgagctatttttcaataaaatttcctacaaataaggtaagcattatgggtatattcaattacttgcagcgattgggaaaagcattaatgcttcccattgccacgcttcccgtagcagcacttttgctacgtttcggccaacccgacgtatttaatattcctttcatcgccagcgctggcggtggtatttttgaaaacctcccgctactatttgcattaggtatcgcaataggcttagcaaaagataatgctggcgctgccgcactggcaggtgtcgtcggttttttagtactcactaaagccacgtcagtcatagactcgactatcaatatgtcttttttcgcaggtattatcgcaggtattgttgccggtcattgttataaccgtttttcaaatacacgtctgccagagtttctcgctttcttcgccggtaagcgattagtccctatcatgaccggcattatttgtctgttcattgcatggatatgtggctatgtatggccatatgtccagcacggtattgatactttcagccttttagtatcaaagagcggcatggccggatggtttacttatggtgtgcttaaccgctctctcattccatttggtttacactatatcctgcattctgttttctggtttagtctgggtgactgtctgaaaattacttatgacttagccagttctgtacataatatctgcctggcaccggatattgtccgttctctgaccatcggcgcagcggttccaggtattgatggctctactattacccaaatagccaccgatatgagccgcggcgacttgaaccgtttcttcgccggtgatccacatgccggaatctatatggcctgggcttatcctatctttatgggcggtttgcccggcgctgcattggcaatgtatcttgcagcaccaaaggaacgtcgtcctcagattggcgggatgctattatccgtcgctttaaccgcatttttaaccggtataactgaaccaatagaattctcattcctattcctggctccagctttatatgttctgcatgccatattggctggtgttagcatggttatcgtcaattcattgggtattctgcatggctttggattctctgccggattaattgaccttgtattgagctggggtctggcaaccaagccgtggttgttaatcccattaatcgccttattctttgtactgtattttgtttgcttcaccctcatgattcgtatttttaacttacgtacaccaggccgcgaaattggagaaacaactcaagcgacttccgcctcccaagacaacgaaacaattcaacattacattaccgctcttggtggtgcacaaaatattcatgccgtagatgcctgcattacccgtctccgtttaaccgttgaagacaacacacaattggatgaacaccggttaaaacaattaggtgcaaaaggcatcctgaaaataggtaagcagagtgttcaagtggtattgggaccccaagcagaaagtattgccgggcagatacgtactcagctatcctcagatagaccagacaaaagatcgtagttaaaaacacctcgaacttaaaagggaactcatctctcgttcccttttatttttcttgcaaaaataagatgactgaatcagtgacaaaaacagtaaaattcatcatttatcctattaattttctggctattttttgtatcttattttaatataaaaaatatctatgaagtacagcatatctctgctcataaaaatgatttaatattcacgcgataaaaagattagttaatcaactaatttatccaactgctataatttcttgttttaagaggcaattatgaggctgatccccctagcgaatgcaagtgacgttggtaaatggtccgcacactatatcgttagcaaaatcaatgcatttaaccccaccgccgagcacccttttattttggggttgccaaccggcagtacaccactggcaacttataaggaattaattgctctgcataaagcagggaaagtcagttttaaatatgtcgtgacattcaatatggacgaatatgtcggtatcaccgaaaatcatccacaaagctatcaccattttatgcaccagaatttccttgatcacattgatattccaaaggaaaatatcaatctgctcaatggtaatgcttctgatgtcgaaacagaatgtcaacgttatgaagacaaaattaaatcttacggtcagattcatctatttatggggggcgtcggtaatgacggtcatattgctttcaatgaacccgcatcatccctgacttcccgtacacgcattaaaacacttaccgtagaaacccgcacggctaactcccgcttcttcgataatgatattaatcaggtgcctaaatacgccctgaccgtaggtgtaggcacgttaatggatgcagaagaaattatgatcctcgcaacgggtctaaataaggcccaagccattcaggcagcaattgaaggcaatgttaaccatatgtggacaataagctgtctgcaaatgcatcctaaatccatcattgtctgtgacgaaccagcaacaatggaattgaaggtaaaaacagtcaaatacttccatcaactggaagcagatattatcggcgaattcgctagcaaaaaataagaatctacgcagcctgatgtctctctcaggctgattaccgccattatcttcaatcatcatctcccgatcccataggaggctaagatgtatgctttaaccaactgcattatatataccggtcacaatagactagatgagcatgccgttatcattgcagacggcttaattaaacgaatttgcctaacacaagagttacccgaacatattgaaaaacgtgatctaaatggtgcaattctttgccccggctttattgatctgcaagtgaatggttgtggtggtgttcagttcaacgatcagttggaaaacatttcagaaaaaacgctggatatcatgcaaagaaccaatgaacgctctggctgcaccagctatttgccgactctgattaccagcacagacgaattgatgatggcctctgttgaggtaatgcgcacttatcttaaacataatcagcatcaggctttaggcttgcatctggaaggaccttatctcaacccagcaaagagaggcactcataatcccgagcttatccgtaagcccacatctgaaatgataaatttcctgtgcaataacgctgatgtcatcactaagttgaccctcgcaccggaaatggttgagcaaaagtatattcagcagttggtagaagccggtattattgtttctgccggtcattcaaatgccagttatgaagaggcccgacaaggattccaaaacggaattactatctcaacccacctttataatgccatgccagctatttcgggacgccaacccggcttgattggcgctatctttgatacacctgaaatctatgctggcatcatcgctgatggtttacacgtttcatggccaaatattcgtaatactaagcgtttgaaaaatgataaattaattctggtaacggatgcgaccatcccagcaggacttgatcccgccatcagtaaaatggcacatttcacctttgcgggtaagaccatatactatcgcaacggattatgtgttgatcaaaacggcgttttaagtggctcctctctcactatgatagatgccgttaaaaatagcgttgaacatgttggtattgcattggatgaagcactgaggatggcaactctttaccctgcccgcgcaattggtgttgataaatatcttggcactgttgaaaccgggaaaatcgctaacctctgtgttttcaatcacgaccttaaaatctgcacgaccatcgttaacggaaaagaaactgaactttgacggactaaatagctgatgagttataacaacacacaaaaacaaattggtaatattgaccttgtaaaacaacttaacggggccgtggtatatcggttgattgatcaacaagggccaatctctcgcattcaaattgctgagcaaagtcaacttgcgccagccagtgtgactaaaattactcgtcagttacttgaacgcggcttgattaaagaagtcgatcaacaagcctctaccggaggccgccgtgccatttccatcgttacagaaaatcgtcacttccatactgttggtgtccgccttggtcgccatgatgctactcttgctctttatgatatgagtggcaaggcattggttgaagaacattatccactgcctgaagcgactcagcaaaaagttgaaaaccaacttatcaacgcaatagaaaattttatccagcaaaatcaacacagaatccgcgaactgatcgccatctcagttatcctgcccggattagttgacccagataccggcatcgtccgttatatgcctcatatcaaagtaaccaattggactctggtcgataacctgaaaaaacatttcaacattagctgttttgttggtcatgatatccgcagcctggcattagctgaacactatttcggtgccacccgtgattgtgaagattcaatactggtacgtatccatcggggtaccggtgccggggtaattatcaatagccagatacttctcaataatagaggaaacttaggtgaaattggtcatattcaaattgatccactcggtgaacgttgtcactgtggcaattttggctgcctggaaactatcgccgctaactcagcgatagaagcgcgagttcagcatcaattaaagcaaggttttccaagccagctaacattaaataattgcaatatcagagctatctgccaagctgctaatcaaaatgatcctctagcatctgaagtcataaaaagtgtcggccattacctcggcaaagctatctctatcgcgattaatttatttaatccacagaaagttgttctggcgggagaaattactgaagctcagaaagtactcttacccgctattcaaagttgtatcaactctcaggtcctgaaagaatttcgtcaagatctgccgatcgttatttctgaattagtccactgttctgctattggcgccttcgctctgactaaacgtgctatgcttaatggtgttctgttacaacacttactcgaaaggtaatgttattttttgttgattttgtcatcaaaatgcttacatgccaaacaaacaagcgactttaaacagatttcgagaaaaaagcagttgacgcatttaactgatatacgcataatgcgccccgcaacgccgatgaaggtaatgcaaaaaagatggctacgtagctcagctggttagagcacagcactcataatgctggggtcacaggttcgattcccgtcgtagccaccatctttgcgggagtggcgaaattggtagacgcaccagatttaggttctggcgccgcaaggtgtgcgagttcaagtctcgcctcccgcaccattcattcatcgagttgtcgttattcagatggggtatcgccaagcggtaaggcaccaggttttgatcctggcatacccaggttcgaatcctggtaccccagccataattctgataacacaattctgacaacatgttgtacagtgaccactttcagttggggtatcgccaagcggtaaggcaccaggttttgatcctggcatacccaggttcgaatcctggtaccccagccactggatatcaatcactggtattttttaatagattttctcacatcaaaaaaggctacgtagctcagctggttagagcacagcactcataatgctggggtcacaggttcgattcccgtcgtagccaccacttattggggtatcgccaagcggtaaggcaccggattctgattccggcattcccaggttcgaatcctggtaccccagccatatttatcaatgtgttacgtgaagtgatatgttgaaaaaatccacagaaagaatagaaaaagaatatacaggtagaatatcttttgatgtagagggccaccgagaggtgtcttttgctttccagccccctatcttttcttgcttgcttgttaattactgcatataaagaaaaacaaattatccacgtcataattaatatagatttacgacgtgcttgtgagcttcactaccaatctatacgttacaatcctaacgcatacttaagcaccgtttttttcattacgccagcccgttgagctgccatcagcgccagattacgagcaactttcagccctggcaattcattactgaacacggtgtaaaatagatccattccagcttgcatcattcggttatccggcattctacgacgctgataacgcatcaatacttccaatgaatcccactgctctgttaattctctcgccttcaccaaaacatcaagcagagtattcacatcccgataaccaagatttacgccttgcccggccagcggattaatggtatgagctgcatcccccaacaatactaatccttcacgcacataactgttagcatgatgacgagtcaaaggaaatgaaccggcggcaacgggagtcactttacctaaccgtataggaaatgcctggaaaatctcctgttcaagttgagccattgacattgcctgtaattgtcgtatgcgtgccggtttgtcgtaccacaccagcgaagcccattgatcaaacagtggaagaaacgctctcgggccagaaggaaaaaactgctgccaagtaatatcctgctggggctgttctgtttttaccgtgatcaacatacaagactgtctgtactgccagccacgactgccaattcctgccatttgccgaacctgagaacgagcaccatcagccccgacaatcaaacgagcagccatctccgttccatcagccagagtcactaaccaacccactttctgccactgcattgcttgcaatactgccgggcatagcaaagtcaaattgggatatttttcaaactgctgccacagagccagttgcaagatacggttttcaaccatatagcccaactcaggcagccctaaactttgagcatcaaacaccaaattagaatcattctgttcccaagtctctaatgtacgatacggcgcactgcgcatctgtaataccgcatcccatgcgccaagttgtttgagcaaatctacagaagcacaactgattgctgatacacgcacatcaggctgactctgtgcatcataagattgtggtggttgatgatccaataaagcaactgtccaaccttcctgtgccaaccccaatgctgttgcagcgccgatcatgccagcaccgaccaccactacatcaaaaatctgttgtgaattattcatatcaaccatgctattaacccattgattagtacagtgtaccgaatttttaattctccggtagagaatatcctgtttaacagtctggtcactgctcctgcaaatgactacaatatccgacaactttatgcctaatacacaattgcttttgccgtgtaataacacttttcagcgcggtagaaagctcggatgcacaagaaaatgtcgacgataaaaaaactgtatattaaaacttggggctgtcagatgaatgaatatgattcatctaaaatggccgacctgctggaaagtactcacggttatcagttaaccgatgtcgccgaagaagcagacattttgctattgaatacctgttcaatccgcgaaaaagcacaggaaaaggttttccatcaattaggccgctggaaaaacctaaaagatactaatccagatctcatcattggagtcggtggctgtgtagcctctcaggaaggcgatttcatccggcaacgcgctcaatgtgtagatatcattttcgggccgcaaacattgcatcgtttacctgaaatgatcaaccaggtgaaaggtacccgcagcccggttgttgatatcagcttcccggaaatcgagaaatttgaccgtctaccggagccgcgtgctgaaggtccatctgcattcgtttctattatggaaggttgcaacaaatactgtactttctgtgtcgtaccttatacccgcggagaagaagttagccgcccatgtgatgatgttctgtttgaaatcgctcaacttgccgctcaaggcgtacgcgaagtcaaccttctcggtcagaatgtgaacgcctatcgtggtgccacttatgatggtgatatctgctctttcgctgagttaattcgtttggtagcggctatagatggtattgatcgtattcgctttacgactagccacccaattgaatttacagacgatattattgccgtttacgaagatacaccggaattggttagcttcctgcatttaccggtgcaaagtggctcggaccgtattctaacgttgatgaaacgcgcacatacagcccttgagtataaaagcattattcgcaaactgcgtaaagcacgtcctgatatcttgataagctctgacttcattatcggattccctggtgaaacccaagatgacttcgagaaaaccatgaaactgatcgctgatgtcaatttcgacatgagctacagcttcatctattctgctcgtccgggaacgccagcagccgatctgcctgatgacgttagtgaagaagagaaaaaacagcgcctttacctgttacaacaacgtatcaaccaacaagctatgagctacagccgtgctatgttgggcagtgtacaacgtattctggttgaaggaacttcccgtaagaatgtgatggaactttctggccgtaccgaaaacaatcgggttgtcaactttgaaggccaacctgatatgattggcaaattcgttgatgttgaaattgttgatgtctacgccaactcactacgcggtaaagttatccgtaccgaagatcaaatggatcttcgtatacacgaatcacctgagtccgttatagcccgtacccgtaaagaagacgaaatcggggtcggcacttatcagccctaaatatagagataatcagtgactcaacaaattcattcacaaatagcaacccaggaaattttcctcgaacccgccgacaatcagcgcctaatgagcctgtgtggtccgtttgatgacaatttgaagcagcttgaacgccggttaggtattgaaattagccgtcgtgataaccgttttaaactgatgggcaaaccgctgtgtgttagcgcagccaccaatatcctacagcatttatatgtggaaacttcccctgtccgtggcgtgatccctgatgtcaagccagaacaaattcatctggcaattaccgagagccgggttctggaacaaaccgccgagagcatacccgaatacggtaaatccgttaatattcgcaccaaacgcggcatggtaaaaccacgcacgcccaatcaggcacagtatattgccaatattcttagccacgatattacgtttgggattggccctgccggcacaggaaaaacttacctggccgttgctgctgcggttgatgcactggaacgacaagagattcgccgtatcctgctaacccgtccggctgtcgaagcaggcgaaaaattgggtttcctaccgggtgacctgagccaaaaagtggatccgtacttgcgcccactctacgacgctttgtttgaaatgctcggttttgaaaaagttgaaaagctgatcgaacgtaacgttattgaagttgccccattagcttatatgcgaggacgaaccctgaacgacgcttttattattctggatgagagccagaatacaaccatcgaacagatgaagatgttcctgactcgtatcggcttcaactccaaagcagttgttaccggtgacgttacgcagattgacctgcctcgtgggcaaaaatccggcctacgccatgccactgaagttctatcaggcgtcggtgagctgagtttcaattttttccacagtgatgatgttgtccgtcacccagtggttgccaaagtcgttattgcctatgaagagtgggaagcaaccgagcaaaaacgcaaacaaacactcagtgaacaacgcaagcaggaagcacaatgagttcagtcatacttgatttacaaattgcctgtgagcattcacaaggtcttcctaaagaaaccctattccagcactggctggatggggttttaccgcaatttcaatctgaaagtgaagtcactatccgtattgttgatgaggcagaaagtcacgatttaaatctgacctaccgtggtaaaaataagccaacaaatgtgttatctttcccatttgaggcaccaccagagattgatttacccctgcttggcgatttaattatctgtcgtcaggtcgttgaaaaagaagcggaggaacaacaaaaaacaatagaagaacattgggcgcatatggtggtccacggatgcctacatctgctgggctatgatcatatcgaagatgatgaagctgaagaaatggaatctttggaaacagaaattatgcaaaagttaggttatgctgacccctatcttgcagaaaaagagtaaccattcgtaccatttttatgctaaaaaataccaacaataacttatttaatgggaaattttcattaaaacgccatgagcgacgaccatccttcaagtaatgacaaccctagccctaagaaagggtttttcactcttcttcttaaccaactttttcacggtgagccaaaaagccgtgatgaactggtggaactgatccgtgactctgaacaaaacgatctgattgatcctgatacccgcgatatgctcgaaggggtaatggatatttccgatcagcgtgttcgggatatcatgatcccccgttctcaaatcgttaccttaaaacgtaatcaaaccctggacgaatgtctggatgtgattatcgattcggctcactctcgtttccctgtgatcagtgaagataaagatcatattgaagggattttaatggcaaaagacctattgccatttatgcgcaccgattccccaccattcagcatagataaggttctgcgtcaggctgtcgttgtacctgaaagtaaacgggttgaccgcatgctgaaagaattccgttctcaacgttatcatatggcaattgtcattgatgagtttggtggtgtatcgggcctagtcactatcgaagatattcttgaattgatcgtcggtgaaattgaagacgaatacgatgaagaagaagatgtcgatattcgtgccttgagccgtcatacctatacggtacgagcactgactcagattgaagactttaatgaagcctttagcacccaattcagtgatgaagaagtggatactattggtggtctggttatgcaggcattcggtcatttacccgccagaggagagtccgttgatatcaacggctatctctttaaagttgctatggccgacagccgaagaattattcaagtttatgttacgataccggacgatgcgccaatacctaaccttgaagaagaataaaatctgaatgaacaaagcttcattattaaattgccagcggctacgcgccttactggcactgttttttggagccagtggaacactggctttttcaccttttgacttctggcctgccgcgattatctccctgtttggactacaacttctgactttaaacagaacaccccgacaagcggcatttattgctttttgttggggattcggtctgttcggcagtggtacaaactgggtgtatgtcagtattgctaatttcggtggcatgccaaccacagtcaatattctgctggtcatattacttgccgcctatctctcgctctatcctgctttattcgctgccttactcaatcgtttcttcgcaaaaacgaacgggttgaggctggctgtagcagcacctgcattatggcaactcaccgaattcctgcgaggctggattctaaccggtttcccctggctacaattcggctacagtcaattagatggtccaatgaaagccattgcaccaattttgggtgttgaggccatcactttcctgttaatggctctcagcgggttattcgttctggccgtcatacatcggaaaatagtcgctggtattatcgctgtcgccattctgctattaccatggccaatacgccattatcagtggtacagcctgctatctgaaaaaactgttgatgtcgcgctgattcagggaaatattccacaatccctgaaatgggaccctaaaatgctcagcgaaactatggacatctacatgggcaacagcctgccatacatcggcaaaatgccgataatcatctggccggagtctgctattccttcattggaaagttatcaacgccactttctaacaaaattggatgaactgttacgcaatcaacataccagcctcattaccggtattgtcgatgaaagagccgttggcgaccgtgataagatctataacagtgtgattgtcctcggcgataaaataccttatcaatatccggcagctattcgctacgataaatatcatctggtaccattcggtgaatttgttccgctagaatccctactccggcctctggcaccattcttcaacttacccatgtcttcattcagccgtggcaactacattcaaccacagctttctgttgcaggatataacctaaccaccgctatttgttatgaaattatactgggtgaacaagttcgggcgaatttcaaaccggataccgaattcttactcactgtttccaatgatgcttggtttggtggttcaattggcccttggcaacatttccaaatggcgcgcatgcgttcccttgaattaggacgcccgttactacgtggtaccaataacggcattacagctgttatccgcccggacggagaagtgcaagcagcactcccacaatttacccgtaatgtcttggtagctaaagtgacacctgcaaccgggataacgccctatgcacgctggggtaactggccgttatggataattaccgtatcattttctctgtttgccttaacgtataaccgccgtaaatcttaattcaaatatccatcttgattcgaatgtctagacagtcaaaagggagcaaaactgctcccttgaaattgtcgatttaacattattaatcggccttatcaacctatagaatcgtctagcaattggcatgaaatataccttgcccaattcagccattgacccatgctaaccctcaatcactgatatcactctatgtatacaagtaacctacttaaacaacttattggtattaattttacccttcgttattattttggcatgctaattgctactatctctatgaatgaaaaggaaaatagctgtttcactaataaaaaatgggaacatgcaccaaaaaaatgataatcacgtatctttattatgcaagacaaacaatattgttcatttatagtgcgagacagctcccgaaatagaaacaattcattttcattatctaacccttttgtactattttttaacactatatacacatacaacagcaaatgatcctagattaaaaacaaatcacagagagacttttgcaaacacaacatcgcaaacgatagccacattaaaggagttatatatgcgtatgcgtaatctagtattaaccatgatgttacttggcatggcgggggctgctcaagccgaagaattaacgggaacactgaaaaaggttaaagatgatggtgtgatcattgtgggacatcgtgaatcctccgtaccttttgcttactacgataaccatcaaaaagtcgtcggctactctcaggattattctaatctgattgttgaagcagtgaagaagaaactggacatgccaaatctgcaagtaaaattgatacccgtgacttcgcaaaatcgtatcccattgctacaaaatggcacttatgatttcgaatgcggttccacttccaataaccttgaacgtcagaaacaagtcactttctctaacagcatctttattattacaacacgtttgctgactaaaaaaggttccggtataaaagatttcccagatttggcgggtaaaaatgtcgttgtctcagcaggtacgacttctgaaatcttgctgaataaactcaacgatgagaaaagcatgaaaatgcgcatcatcagtgcaaaagatcatggtgactcattccgtactctggaatctggccgggcaatcgcctttatggtggatgatgcactactagcaggtgaacgcgccaaagcgaaaaaacctgatcaatgggaaattgttggtacacctcagtctagagaagcctatggttgtatatcgcgcaaagacgatcttcaattcaagaagctgatcgatgagaccattgttcaggcgcaaacctctggagtggcagagaaatcatttgagcgctggttcaaacacccgattccacccaagaacctgaatttgaatttctctttgtctgatgaaatgaaagcactatttaaatcgccaaatgataaggcgcttgactagaaatataattaaaaaaatgactatttgattggcatcacagggtgcgaggtggtcgttccctacctcgctttttttctcagccaatcaatcgttttcaggggatcaagctacaccctaacagggagtattattatgtcaatcgattggaattggggcatctttttgcaagctgcccctttcggcaatacgacttatctaggctggttgatagctggatttcaggtgacgattgccttgtctatctgcgcctggattatcgctttcattgtcggctcactgttcggcatcttacgcactgttcccaataaaatattatctgggataggtacctgttatgttgagctctttcgtaacgtaccactgatagttcaattttttatctggtatctggttgtacctgaactactaccagaaaaaatcggtctgtggtttaaaactgagctggaccctaatatccaattttttctctcatccactgcctgtttaggtcttttcactgctgctcggatgtgtgagcaggttcgtgccgccatacaatcactaccacgtggtcaaaaagcggcagggctggcaatggggctaaccttgccgcaaacctatcgctatgtcctattacccaatgcctatcgagtaatcattccacccatgacatcagaaatgatgaatctggtgaaaaactccgccattgcctccactattggtctggtagatatggcagcacaagcaggtaagttacttgattactcagcacatgcttatgaaacatttacggcgattacgctagcttatatcggaatcaatctggtgattatgcttgccatgcacttgcttgagaaaaaagtgcgtttaccgggtaatattggaggtcaataaatgtacgagtttgactggagttcgattatccccagtatcccgtttctgctacaaggcttagtcattacagcaaaaatcacgattattgctgttgttgtcggtattctctggggaaccgtactggctgttatgcgcctctcttcggtaaaagcactgagctggtttgccactttatatgtcaatctgttccgttctgtaccactggttatggtactgttatggttctatctgattgtgcctagcctagtgcagaacgttctagggatttctccgaaaacagatattcgtttaatttcagctatggttgcatttgcctttttcgaagctgcttattattcagaaattatccgggcaggaattcagagtatttcccgcgggcaatcttcggcagcactggcattgggtatgacaccaatgcaaagtatgagactggttatcctgcctcaggcattccgtgcgatgaccccgctgttactgacacagggtatcgtactgtttcaagacacctcattggtgtatgtgctcagcctagcggactttttccgtactgcggcaaatatcggtgagcgtgatggcactcaggtcgaaatgatcctatttgctggtttggtttattttattattagtattgccgcatctatgctggttaactatttgaagaaaaggactgtttgatgatctccctgaaaaatgtatccaagtggtatggccaatttcaggttctctccgactgctcaactgaagttaaaaaaggtgaagtcgttgtggtctgtggcccgtctggctcaggcaaatccaccctgataaaaacggtcaatggcctggaatccatccaacagggtgaaattctggttaatgacattaaagttaatgataaaaacaccaatctggcacaactacgctctaaagtcggcatggtgttccagcattttgagctgttcccccatctatccatcattgaaaatttaactctagcgcagattaaagtgcttaatcgtgataaaaaagcagcggaagaaaaggggctgaaattacttgaacgcgttgggcttgccagtcaagcgaataaattcccgtctcaactttccggtggtcaacaacaacgtgtagcaatcgcccgagccctttgtatggacccgattgccatgctatttgacgaacctacctccgcactcgaccctgaaatgatcaatgaagtgctcgatgtcatggttaaactggcagatgaagggatgaccatgatggttgttactcacgaaatgggctttgcccgtaaagtagccaaccgggttatctttatggatgaaggcagaattgttgaagatagcaaaaaagaagatttctttgcgaatccaaaatcagatcgcgccaaagaatttctagctaaaattcttcactaacctcatttcatccccggtggtgactcccgtcgccatcggattttccctcagaacctctgtttcttatataccaaatcagatatgctatgccgatctcatattttaccaactaaatgattgctacaaacgtagctttttactcaccataggatcatcggtgccatgcaagaacaataccgtccagaagatatagagccgcaagttcagcttcactggcaagagaagcaaactttcaaagtgacagaagacaacagcaaagaaaaatattactgcctgtccatgctaccttacccttctggtcgactacacatgggccatgtacgtaactacactattggcgatgttatctcccgttatcaacgtatgcttggaaaaaatgtcctgcaacctatcggttgggatgcatttggcctgcccgcagaaggtgccgcagtaaaaaacaatactgcacctgctccgtggacctacgccaacatcgaatatatgaaaggtcaattgaaaacactgggcttcggttacgactgggatcgtgaagtcacaacctgtaccccggaatattaccattgggaacagtggtttttcaccaaattgtatgaaaagggcttggtttataaaaaaacctcctcagttaactggtgtccccacgatctgactgttctggctaatgaacaagtggtcgatggctgctgctggcgttgtgatagcaaagttgaacgtaaagaaattccacaatggtttatcaaaatcactgattatgccgaagagttgttaagcgatctggagacgctggaagagtggccggagcaggtcaaaaccatgcagcgcaattggattggccgttctgaaggggtagaaatcacttttgatgtggctgatagtcaggagaaactgaccgtctataccactcgtcctgatacgttcctcggcgccacttatgttgcgattgccgccggtcatcctctggcaaaacaagcagcagaaaataaccctgaactggttgctttcattgatgagtgccgtaataccaaagttgcagaagcagatatggcaacaatggagaaaaaaggcatggcaaccggtatgtttgctattcattcattgaccaaagagaaagtggcaatctgggttgcaaacttcgtcctgatggaatacggcaccggtgcagtcatggcagtgcctggccacgatcaacgcgactgggaatttgcgacaaaatataacctgccaataaaagccgttattctggacaatgaaggtaatgaaccgaacgtccatgaagcaccggtaacagataagaatatcctgtttaattccggtgaatttagcggtctgaatcacgaagccggttttaatgccatcgctaataaactggtggaaatgggcgtaggtaagcgtaaagtcaactatcgtctgcgcgactggggtgtttcccgtcaacgctactggggtgctcctattccaatggcaacactggaaaatggcacagttgttccggttccagcagatcaactgcctgttattctgccagaagatgtcaaaatggatggcatcaccagcccaattaaagctgatcctgagtgggcaaaaaccactatcaacggccagcccgcactacgtgagaccgataccttcgatacctttatggaatcttcctggtactacgctcgctacacctgcccagattatgacaagggcctgctcgatccagcagcggctaactattggctgccagttgaccaatacatcggtggtatcgaacatgccatcatgcatctgatgtatttccgtttcttccacaaactgatgcgtgacgcaagcttggtcaattccaatgaacctgccaaacgtctgttatgtcagggcatggttctagccgatgctttttattatatcggcaaaaatggtgaaaaaatttgggtttccccggctgatactatcgttgaacgtgatgataaaggccgtatcgttaaagcgacggataaagaaggccatgagctggtttataccggcatgagcaaaatgtctaaatccaaaaacaacggtattgacccacaattgatggtagaaaaatatggtgctgataccgttcgcctgtttatgatgttcgcggcaccaccagagctgacgctagaatggcaagaatccagcgttgaaggagcaaatcgctttttgaaacgtgtgtggcgcttggtttatgaacatagcagtaaaggggcaactcaaccactggatatcacaaacctgacagtggaacaaaaagatctattccgtgacctgcacaaaaccatcgctaaagttacagatgatgttggtcgccgtcaggcattcaatactgctatcgctgcggtaatggaattgatgaataaactgacccgcgcaccacaggaaactgagcaagatcgcgctctgatgcaagaggcactgttggcggttgtccgtatgttgtcaccaataactcctcatgcttgctttattatgtggcaagctctgggtggtgaaggtggtattgatacggctgattggccacaagctaatgagcaggcaatggttgacgataccaagctagtcgtcattcaagttaacggtaaagtgcgtggtcgtgttactgtgccagccgatgcgactaaagaatatgttcatgatctggcagcacaagagtatggtgtggcgaaataccttgaaggcgtcactattcgcaaagtcatttatgtaccaggcaaactgctgaatctggtcgtcggctgataaaggaggcaatgtgcgacatcgtattttaacgttgttgctggggttggcggtgctagtcaccgctggctgcggttttcatctgcgcggcaccacccaggtgccagcagaactcaaaaagctgcaaataacaagcagtgacccatatgggccactggcccgttccgttcgccaacagcttcgtctgaataacgtcactatccttgaggatggtagcgctgatgttcctgttttgaagttaattgactcttctgaaaataaagatactgtctctgttttccaagatggtaaggcagctgaacgccaattgacactgaatgtcaatgctcaagttattatgccagacggtagcgtatatccgctgcgatccagggttgaccgctcttttttcgacaacccattagaggccctggcgaaagatgctgaaaacgagataatcaatcaagaaatgcgtgaacaagctgctcgccggttagttcgccagttattgaccgttcacaacgcagaaaagcagaaagccagagagaaacaggtgggacagcaagctgcgcaagcacaatgatcaaactctatcccgaacaactgatttcgcagctcaatgaggggctgcgaaactgttatctgatatggggtaatgaacccctactattacaggaaagccaggatcatattcgcaaggctgctgaaaaaaacgccttcactgaacacttcacctatacgctggataatcacaccgagtgggatgagatattcaatatttgtcagtcattaagtctgtttgctagccgtcaaacactcactttattactgccggaaaatggccctaacacaaccatagccgaacaactggtgaaactggcagaactacttcacccagatatactgctaatactacgtggtttgaaattgaccaaggctcaggagaacagtcactggttcaaaatactaggaaaaaatggtgtttatgtcagttgtcagaccccggaacagaaccgtctgccgcagtgggttgcacaacgggccaaagctatgaaattggtgctggaagaacaagccaatcaactactgtgttattgttatgaaggaaatttactggcgttagctcaggcacttgagcgtctttccctgctatacccagacggtaaactaaccttacatcgtgtcgaaaatgcggtaaatgacgcagctcactttacaccttatcactgggtagactcgctattatcaggtaaagcaaaacgagcctggcatattctaaaacagttaaaacaggaagattgcgaagctgttattctattacgtaccgtacagcgtgaattactgttgctactcacgctgaaacgtcaaagtaccacaaccccgatgaaaacactgttagatcagcatcgggtatggcaaaaccgccgttcattactgacaagcgcactgcaacgtctcactcaacatgatttgcagagagcaattcatttacttgtacagatggaacgccagatcaaacaggattacggccagtctatttggtcagatttagaaactctttccatgctgttatgtggaaaaaccttacctgagagcttttttaatgcctcatgccattgattctacttgcccgaaacaacccgttattaaagcattatttggtggaacattcgatcccatccattacgggcacttgcagccagttgaaaccctggcatatcaaactggcctgaatcaagtgattttactaccaaatcacgtcccaccacaccgcccacaaccggaagccactgcacaacagcggcttgaaatggtacaactggcagtacaggatagcccactgtttaccgtcgataagcgtgaactggagcgtactatcccctcttacacaattgatacgctagagtcattccgtcaggaacttggtaacaaacaaccactagcatttataatcggccaggatgctttgttatcactgcacacttggcatcgttggcaagagctactgagtttctgccatttgctagtttgtgctcgtcctggttatcaaactcagttttccacaactgaaatgcaacaatggcttacaaaacatcaaatctacgatccaagccaacttggcagtaaacctaacggttatatctatctggcagatacacctctgctgtcgatctcagcaaccgacatccgtcaacgccaccagcaagggttaagttgtgacgatttactccccctttcagtacaaaagtatatagattcacaggggttatatcgccaatagcggaatctgcctcgattagtcgcttagttgacttacccttaagtgacctgacatgctattattccgcactatttaatcaattgtgataaaaaataaggatgagccttttgcaaggtaaagaactccaacagtttgttattgataagcttgaaaactccaaagcacaggatattgtttcccttgatgtccaagggaaatcaagtattaccgattgcatgatcgtctgtaccggaacttccagccgccatctgatgtctgtcgcagataatctggttgatgactgtcgtgcgagcggcctgatcccactcggcgttgaaggacaaggcgtatctgactggattgtcgtagacctcggtgaagttatcgtacatgtcatgcaagaagagagccgccgcatgtacgaactcgaaaagctctggagctgagtttgaagctgcaattaatcgctgtaggtacaaaaatgccggactggatacaggccggctttacagattatttgcgtcgttttcccaaagacatgccatttgatctgatagaaattccggccggcaaacggggcaaaaatgcggatattaaacgcattctggaaaaagaaggcgaacaaatgctggccgctgtcagcaaaggcagccgtattgtcaccctggacattccgggttcccgttgggaaacgcctcaattggcgcaacagcttgaacattggaaacgggatggtagagatgtcagtttgttgataggtggacccgaaggtctcgctccggcatgtaaagctgccgcagagcaaagctggtcactgtcaccgctgaccttaccccatcctctggtccgagttttagttgcggaaagcctgtaccgggcatggagtattacgaccaatcatccctatcatcgggaataatttggttatcaacggataaaagcgaatttctggcaatgggatgaagaataaacgtaccccttttcgtgattatacggctgaatcagccctatttgctcgccgcgcattggtggcgtttattatcatcttggtactgacgggtatcctgatggccaatctttaccatttacaaatcacccgccacgaagactatcaaacccgttcaaacgaaaaccgtattaaactggttccaattgcaccaagtcgcggtatcatttatgaccgaaacggcacgccattggcacttaatcgaactatctatcagttggaaattatacctgaaaaggtagaacaccttgagcaaacgctgaatgatttacgcaatgttatcgatctgactgacgaagatattgccaactttgaaaaagagcgtaaacgctcgcgccgctttacctctattccattgaaaacttcacttgatcatattcaagtagcacgctttgccgttaaccaatatcgtttccctggttttgaaataaaaggttaccaacgccgcttctacccttatggttcagcactgacacatatcatcggctatgttgctaaaattaatgataaagatgtagaacgattggataaagaaggtattttacctaattacgccgctacccatgatatcggcaaactgggtattgaacgctattatgaaactgttttacacggcaaaacgggttatgaagaagtcgaagtgaataaccgaggccgggtgatacgccaattacatgaacaaccaccacaggccggacaggatatttacctaactatcgatctcgaattgcagatttacattgagaaactcctgacaaccagccgtgctgcggtcgttgtcagtgatccacgtaatggggaaattctggcgctggtatctaacccaagctatgatccaaacctattcgtaaacggtatctccaataagaactaccaagagctattaaacaatcctgataggccacttattaatcgtgctactcaaggaatctatcctccagcttcgacagtgaaaccttttattaccgtcgcagcactaagtacaggcgttatcaataaaaataccaccatttttgatccgggttggtggcaattaccgggttcagaaaaacgctaccgtgactggaaacgttgggggcacggtagtctcaatgcacatagagccattgtagaatccgcggatactttcttctatcaagtggcctatgatatgggaattgatcgtctatctgagtggatgaccaagtttggctatggcgaatatactggaatcgacctagccgaagaacgcaccggtatcatgcctacccgcgaatggaaacaaagaaaatataaaaaaccttggtatcaaggagataccattcctgtgggtatcggccagggatattggacagcaacccccattcaaatggtaaaagcactgacaaccttaattaacgacggtaatgtaaaaacaccacatcttctgctaagcaagaagctgaaaggtgagatgatcccttatcaacaaacagaaaatattcagatcggtgatatccattcaggatattgggaattagccaaaagtggcatgtacggtgttgctaacctaccaaacggtaccggccacaagagctttatcagcacgccttataaagccgcggtcaaatcgggaacagcacaggtctacagttatgaaacctacaatgccagtaaaattgctgagcatttacgggatcataagctgatgaccgctttcgccccttatgaaaatccgacagtagccctttccattattttagagaatggtggtgcaggtccagcagtgggaacccttgttcgccaaatcctcgaccatgtactattaggggataacaacataacattgccgaatgctgtccctacacctcccggaacagaaagtgactgattaacaccatgacagaaaaccaaaaaagggttcctctctggaccagattacatatcgacctaccgttactcctgtgcattttggcattgctgatatacagcgcttttgttatgtggagtgccagcggccaagatatggggatgatggagcgcaaaattggtcaaattggtgcaggactggttgtcatgctcatcatggcgcaaattccaccaagagtttatgaaagctgggcaccccatctctatattgtttgtgttattttactgatttttgtcgatgctttcgggcaaataagtaaaggtgcccaacgctggctggatttagggatcatccgcttccaaccttcagagattgccaagatagccgtacccctgatgatcgcacgctttatgaaccgcgacttatgccccccatcactgaaaaataccactatcgctctgatgctcatttgtctgcctactttactggttgccgctcagccagacttagggacttcaattctgatcgcggcttctggtctgtttgtcctgttcctttcgggcatgagttggcggttgatcggtatcgcagctctactgttagcctgttttatccccatcttgtggttcttcttgatgcatggctatcagcgcgatcgcgtcatgatgctacttgatccagaaagcgatccactaggtaagggttaccatattattcaatcaaaaatcgcgattggctccggtggtttatcaggtaaaggctggctattaggaacacaatctcaattggagtttctgccagaacgtcatacagatttcatatttgccgtactatcggaagaacttggtttgattggcgtactactgttattaacattatatatgttattaattacgcgtgggttggttatcgcaaccagagcacagaacacttttggtcgggttatggttggcggcctaatgttaattctatttgtttatatcttcgtcaatattggcatggtgagtggtatcctgcctgtagtcggcgttcctttgccatttgtcagttatggcggctctgcgttaatcgtcttaatggcgggtttcggcattatcatgtcgattcacacacacagaaaattgttgtccaaaagtttatagagaagaggtttcaatgcgtcaacactggcttatactcagcatgattgcagccctgctatctggctgtactactcctgacaaacaaaaatctgccccgttacccgcagtaccaacgcaggatgttctgggtgcagaacctcgttatgagccttatcatcctagcgccaatgatgattatcagatgaacggacatacttatcacattgtgcaagccccctctcagtttagtgagacaggttatgctagttggtacggtgaagaatccagcggcaaaatgaccgcaattggtgaacgttttaatccttatgcgctgacagccgcccatcctaccctgccaattccaagttatgtccgtgtgaccaacttgagcaatggccgcatgatgattgtcagagtcaatgaccgtggtccttataaaccagggcgaattatcgatctatcgaaggcttccgctgaacggttaaacctgactcaaagtaccaaagttaaggttgattttatcgaggttgcccaggacggttctgcatccggtcccggtaccattggcagccagatagttaaacagagttatgctctaccgggtagaccaacgctgacaaccagtccattaggaacaccaacaatggagaatatccctgatcagactagcagccagcccttaacaaatcagccgatgaaactgacgatacaaccggaagcgactgaacaactccccgcaatgaagctgcaaccacctaagtctgttacaaacagtacttcaatagtcacaacaccaacagccgcctcagcaaatggttttatggttcaggttggtgctgttagcagtgagcaacgcgcaaaagagtggcaacaaacactagcgcaacgctttaatgttcaaggtcgcgtaactcaatatagtaacgtttatcgtgtacagttagggccattcaacaatcgccagcaagctgccgatttacaacaaaaactggctgaccagatacagcaatcttcttttatcgtcagtccctgatcgttctcttactgatatttcactttgattcagatatcagtaagaggagtaaaaaaaatgtaaacctgagtcttgtcaaaatttggcaatgtcactatttttttcatttgctatgatgtggctcgatatcaaccttttctcacggatgttgtcaaactaaccatgaaatatacaaccacttctcgttttataaaaagcgccaccttgggtattgcgctggcaataagtgcttctgcctttgccaatgggaatgatgccaacctgaaaacgatgatcccaggtgtgcctcagattgatgcggaagcttatatccttatcgactataactcaggtaaagtgctggctgagatgaatgcagatgcacaccgtgatcctgccagtctgacaaaaatgatgaccagttatgttattggtcaagcaatcaaatcaggcaaaatccacccaagtgatatggtcactgttggcactgacgcatgggcaaccggtaatccggtatttaaaggctcttccctgatgtttctcaagccaggcgatcaggtctcggtttctatgttatcccgcggtataaacttgcaatccggtaacgatgcctgtgttgcaatggcagattatgttgccggtagccaagagtctttcgttaatttaatgaatggttatgtgaaatcgcttggattaaagaatacgaatttcaaaaccgttcatggcttggatgcagaaggccaatacagctctgcccgtgacatggcattgattggtcaagcgctgatccgtgatgttcctgaagagtacaccatctataaagagaaagagtttacctacaacaatatccgccagacaaaccgtaatggcttattgtgggataagagcctgaatgtcgatggtattaaaaccggccacactagcgcagcgggctataacctagtcgcttctgcaacggaaggcgatatgcgcctgatttctgcggtattaggcggccacacttataaaggccgtgaaacagaaagtaagaaactgctgacctggggtttccgtttctttgaaactgttgctcctctgaaagcaagcaaagaattcgcttctgaaccagtctggtttggagataacgatagggttcagttaggtgttgataaagatgtttatctaactattccccgtggtcgtctgaaagatctgaaagccagctatgtcatgaataatagtgaattacatgcaccactggcgaaaaatcaagtcgtaggtactatcaactttcaacttgatggcaagactattgaacagcagcctttagtcgtgatgaatgaaataaaagaaggcagcatcttcggccgctttatcgattacatcaaactactatttcatcattggtttggctaattcttgagacaattaagcgataaaatcgggttactacccgatcgcaataagcatctccgtgtttttaaggcggaggaaagtatcaaattttacagaagaaactgaccgtacgtatcgcggaaagcaaaacaggagcgcccatgaaaaccaaattaaatgaactgcttgagttcccttgttcattcacttacaaagtgatgggcttagcggagcctgagctagtcaatcaggtcgttgaagtggttcaacgtcatgcgccgggcgattactctccacaagtgaagccaagcagcaaaggtaactaccactcagtgtccattactatcaatgcgactcatattgaacaagtagaaacgctatatgaagagttaggtaaccttgaattggtacgggtagtcttgtaatacacacaagagaaatcccctataattttacaggggattctttatctatcaggaatactacagtttcagatgcactaaactggtgagaagctcttctgagggttatactgaccaaatcttatagctatcaaatgaagtttcaattgcaacataaaacgattttcttacgtcaattaggaatacagccctacgagccgatttctgatgcaatgcacttgtttactgagcagcgagatactaatacacctgatgaaatctggctggtacagcatccaaaagtctttactcaaggacaagcaggtaaagctgagcatttgctgtccctcggtgatattccggttattcaatccgatcgtggtggacaagtcacctatcatggccctggtcagcaggttatgtacgtcatgattgacattaaacgcgccagaattggtgtacggcaactggttacggcgatagaggatactgtcattaaaacccttgctcactttggtgtgaaagcctatgcccgcccggacgcccctggtgtctacgtcaatgaagcaaaaatttgctctcttggattacggatacgtaaaggttgttctttccacgggttagccctcaatatcgcaatggatttagaacccttccagcgtattaacccttgtggctatgccggcatgaaaatgattcaactcagtgacttagttcctggaattactgttgaacaagtacaacctgttttggtagagaaattttgccagcagctaggatttaaactgaacagttaaagatgctataattttttaacatttttcaaaaattttttaattgtttatcatacagtagactgaatgataaatctcaacctgatgaatttaacactggaaccagcacgattatgagtaaaccaattcagatggaacgcggagttaagtaccgcgacgcagacaaaatggcgctgatccctgtcaaaacagtgatgaccgaacgtacagaaatcttgcgtaaacctgagtggatgaaaatcaaacttcctgcggattccagccgcattcagggcatcaaatctgccatgcgcaaaaatggcctgcattccgtttgtgaagaagcatcttgccctaacctggcagaatgcttcaatcacggtacagcaacctttatgatccttggcgcaatttgcacccgccgttgccctttctgtgatgttgcgcacggccgcccaatggcacctgacaccaacgaaccggtaaaactggcacaaaccattaaagatatggcactgcgctacgttgtcatcacctccgttgaccgtgatgatctacgtgacggtggtgctcagcactttgctgactgcatctctgctattcgtgaaaaaaatccatccattaagattgaaaccttagttcctgacttccgtggacgtatggatcgtgcacttgaaatactgacagcgacaccgcccgatgtctttaaccataacctggaaaacgtaccccgggtttaccgtcaggtgcgccctggtgcaaactatgagtggtcactaaaattacttgaaaagtttaaagaagcccatcctgatattccaaccaaatcgggtctaatggtcggtcttggtgaaaccaacgaagaaattcttgatgttatgcgtgatctgcgccgccacggtgtgactatgctgactctgggacaatacctacaacctagtcgtcatcatttaccggtacagcgctacgtcagcccacaggaatttgatgaaatgaaagaagaagcgttagctatggggttcacccatgctgcctgtggtccatttgtccgttcttcttatcatgctgacttgcaagccaaaggtgaagaggtcaaataacccagtttcttataccctatgggtttcaagctgcatcgcgacggcaagggagtgaatccccgggagcatagcaaactatgtgaccggggtaagcgagtgcagccaacaaagaggcagcttgaaagatgacgggtatattatgattaatattattctggctatatttatcggaggtggcttaggcagcgtattacgctggtttatcagcctccgtcttaataatatttcttctaatatcgcaattggcacccttaccgttaactgtattggtgcattaattatcgggctaggattagcctattttaataaatctacccatcttgatccggcttggaaattgatgttgaccaccggtttttgcggaggtttaacaaccttttccacattctctgttgaagttgtttatttgttactggacgggaaactaggatgggcactgggaacagttttgcttaatctttttggatcattactgatgaccatgttagctttcgtattgatgcatgaactttaaattaaaattacttacatatcatacaagacaaaaaaaacccgttgaaataacgggttttcgaaatacggagttaaaatcagatagcgacaacgtttacagcagatggacctttagcgccgtcagtgatttcaaactctactttttgaccttctgccaaagttttaaatccggtaatctgaatagcagagaaatgcacgaatacgtctttgctaccatcttctggagtgataaacccgaatcctttagattcattaaaccacttaacgttacctttaatttttgacatcaaacttacctttaacgtgaaaattaagacacaaaatctgcgtcgcatacagtacaacaaataagttggctcactgtctacaaccaagatcacgaaaagcataataaaatacgatagatgttatctttatttagttttactactaaataatacacatatataaatatctataaccttccctggtcttttatcacacaagttatctaacaaacaaatgactaggttttttcatgttctaatagccagcttttaatattcaggccgccggtatatcccaccaatttaccatcatgtccaataacacgatgacaaggcacaattaatgagatcggattacgagaattagccattcctaccgcacgacaataattaactgaacctaatgctaatgaaagttgcttataactccacacttctccaaatgggatcttacataactgtaaccatacacgctgctggaattcagttcctgccgggttgagtggaacagaaaactcagtacgcttacccgcaaaatatccccgtaactctttcacgcactgcttagtaatatcatttttcacttcaggcgctgttttttcatcaacaaaatatagactggtcactcccttatcatccgcagtgatatgaatatacggtttaggaaatcctttgggtgtatcaaaatagtgatgatacataaccacctccattgaaaaaaatatcaatcattatagggattagagtaaatcgtcttttcgacaaattgcaatgatgaattcagttgctcccttaccaccgactagaaaacttaaacttgtctgaaggcgaaaagtctaccaacaaacagggaataaccaacattgtaattttaatgatagtcactcgatgtaaaataaacaccatatatagtgcggttgaaataaaatttcactacatatagtataattcaagttctggcctccaggtaaattatcactcatgaaccaaattttgccattacatgcccacaaactgacaaaggagtcgttaatgagcattaccatttatagcaaaccggactgcgtacaatgcagcgcaacctatcaggtgctaagccgaagaaatattccttatcagattatcgatttaaccgaaaacccgcaggctttagcgactatccgtgctatgggctatcagcaaattcctgtggttgttgcaggtacacagcattggtcaggatttcgtccagataaaatcaacgcattaatcgagaatgtataggtttattatgaatataaatccgctgatctatttctccagttcatcgagtaatagtcatagatttgttcagaaactggagataccagcctttcgtattccaataaatcaatcagacagcccattaaatataacttctccttacattttactgacccccagttacggtggcggcagtactaaaggcgctgttccaccacaagtgatccgatttctcaatatcgccgaaaaccgggcattcatccggggagtcatcgcggccgggaataccaactttggcgaagcttacggcatcgctgggcggataatttcagagaaatgccggataccgctcctataccgttttgaactgttgggtactgaagaagatgtacaacgggtacgccaaggtattcaaagattctggcaacatgactcattagagaatatgtaattatgacttttcaaattaatgcacaacaagattatcatgctttaaatgccttgctcaatctgtacgatagtgaagggaatattcaatttgacaaagacaagctggctattcattgttattttcgccagcatgtaaatccaaacacactatttttccatagcctaaaagagaaactggatttcctccaacaagagggatattacgaaataaacgtgctagagcaatacgattttactgttattaaaaagctctttcagcaagcctatagcaaaaaattccgctttcaaacctttctgggcgcattcaaatattacaccagttatactctgaaaaccttcgataataaacgttatctagaacgctatgaagatcgggtatgcatggtagcactgaccctagcccaaggcgatcagatgctggcttgtcgtctagtggatgagatgatcagtggccgttttcaaccagcaacgccaacttttcttaattgcggtaagaaacagcgaggagaattggtttcctgtttcctgctacgcattgaagataatatggaatccatcggacgttcagttaattcagccttacagctttcaaaacgtggcggtggggtcgcattcttactcagtaatctacgggaaacgggtgcaccgataaaaatgattcaaaatcaatcatcaggtgttatcccagtgatgaaaatgctggaagatgcgttttcatacgctaatcaactcggtgcacgccaaggtgcaggtgccgtttatctccatgctcatcaccccgatattcttcgttttctggatacaaaacgggaaaatgccgacgaaaaaatccgtataaaaacgctctctattggcgttgttattcctgatatcacttttaagctggctaaacataatgaagatatgtatctattctccccatatgatattcagcgggtttatggtgtgccaatgtccgaaattagcatgacagaaaaatatgctgaaatggtaaataaccaacaaattcggaaatcaaaaatcaatgctcgtgaatttttcatggcattagctgagctccaatttgaatctggttatccttatattatgtatgaagacacagtgaataatgctaacccgattaaaggtcggattaatatgagtaatttatgttccgaaattttacaggttaacagcgccagcgaatatgaagaggatttaagttaccaccatattgggaaagatattagttgtaatctgggatcaatgaatattgctcatacaatggattcacctgattttaccctctctattgaaacggctgtccgcgctttaaccgcggtatcagatatgagccatatccgttcagttccttctatcgaaaaaggaaatcaggattctcatgctattggtttagggcaaatgaatcttcacggctatctggcaagggaaaaaattcattatggttctgaagagggaatagatttcaccaatatctatttctatatcgttacttatcacgctctgcgtacttccaatcagatcgccattgaacgtaatagctactttaaaggctttaaagattctcgttatgccaatggtgaatttttcaataaatatacagaaataacatggcaacctcagacaaaaaaagtttctcaattgtttgaacaagcaggaataaaaattcctaatcaacaagactggcttgaattaaaagcctcaattatggctcatggtatttacaatcaaaatctccaagctattgctcctacaggttctatttcatatatcaacaattcaacctcaagcattcacccgattgtatcccgtattgagatccgtaaagatggtaaaacaggtcgggtatattatccagcgccatttatgacgaataataatcttgaatattaccaagatgcttacgaaataggaccggaaaagattattgatacttatgctatagccactcaacacgtcgaccaaggattatccctgacacttttcttcaaagacgatgccactacccgtgatattaacaaagcgcaaatttatgcctggcgtaaaagaattaaaacactttattacatccgtctgaaacaaacggctctggaaggcactgaagtacaagattgtgtttcatgctcactataaaatgattctggaaatgtattatgatcagtaatcctatatgtgcaattaactggaaccgaattgaagatgacaaagatctagaagtttggaaccgactgacaactaatttttggttaccggaaaaaattccattatccaatgatattacttcatggaatacactgacgacagaagaaaaaaagctgactatccgggtattcaccgggctgacactactggacacaattcagaacactgttggtgctccagcgttaatggaagatgccctgacaccccacgaagaagcagttatgtccaacattagtttcatggaagctgttcatgcacgttcttatagctccattttttcaacattatgcctaacaactgatgtagatgacgcctatcgctggagtgaaaagagtttttcattacagaataaagccaaaattatactaaattattatagttatcatcatccattaaagaaaaaaatcgccagtgtttttctagaatcatttttattctattcaggtttctatttacctatgtattggtcaagtcgaggaatattaacaaatacagccgatttaatccgacttattatccgagatgaagccattcacggttattatattggatataaatttcaacaatcattaaaaaaacattcaacactagagcaaaaagagattaaagaattcactttttcattattattagaattatacgaaaatgaaatcaaatatacagaagaactttatgatattgttggctggactgaagatattaaaaaattcttgcattataatgccaataaagcattaatgaatcttggatatgaaaccttatttccgccagaaataacaaatgtcagccctacaatcctctctgcattatcaccgaatgccaatgaaaatcatgatttcttttctggttcaggttcatcatatgttatcggtaaagcagtgaatactgaggatgaggattggaatttttaaagagaatgattttattttatatagaaggaatacttcaaaataaccataatactctaatactttaaaaaccaatattattgatcctgttttttaaacgataaaacgccataaaatccttatatttttatggcattttttcatgactattgccatttctatggatattttttgccatctccgcctcttatatcatccgaaacgacaaaaaacattaatatagctaattaattttaaattaaatttcattctaataagacataatcaacatgataaactaataagcgattctatttacaacatagtgaataattcatttgtcgatcaaatttaaaattcattaataacaacaacatagatacaattaacccttacaatgaccgcatggatttgggtaaaatgaatgactaataaccatgaaataactacaaatatatctaatttaagtcattcaatatcactattttttacattaattatcattaacatagggttgtcaggctctctcagtatgttagggtatatatattcaaagaatcatgcagagatgaataatgcataacaccattaaataaccattgaaaggaaagtaactatttcatggcaattaaacttgaagttaaaaacctctataagatatttggcgaccattcagaatatgctttcaagttactgaattcgggtttgagcaaagatcagatatttgaaaagacaggtatggttgttggtatacaaaatgccaatctgactattgaagaaggcgaaatatttgtcatcatgggattatctggctccggcaaatccacaatggtacgccttctcaatcgtctgataaaaccgactcgcggccaagtattaattgatggtgaagatatttctgagatttcaacagcagcgttaagagaaattcgccgtaacaaaatcagtatggttttccaatcatttgcactgatgccacatttaaacatactggaaaacagcgcctttggtatggaacttgccggaatcaccaaacaagaacgcaataaaaaagcattggatgcactgaaacaggtaaacctggaaaattatgcacaatcttatccagatgagctctcaggcgggatgcgccaacgtgtagggcttgccagagcattagctaataacccagatattttgctaatggacgaagcattttctgcccttgatccattaattcgtacagaaatgcaagatgaactgctaagcctgcaaggcaatcagccacggactatcgtctttatctctcatgatttggatgaggcaatgcgtatcggagaccggattgccattatgcaagacggtgttgttgtgcaggtcgggacacctgatgaaatcttgaataatccagcgaataactatgtgaaaactttctttcgtggcgtggatatcagccatgtattcagtgctaaagacattgcccgtcgccgtcctgactctctgcttcatattgcacccggttttggtcctctttctgcattgaaagtccttgatgacgaaaacagaaactatggttacctgatcgaacgtggacaaaaattcgccggtatcgtttccgtaaattcattggaaaaagcattacgggaaaaaaaacctatcgaacacgccatattggcggaaccaacctccgttgccgcagatatgcccctcaatgagctgattgctgttgtagcacaatcaccttgtgcagttccggtggttggaaataatgacaaatatatcggcgttatttccaaagggatgctattgcaggcattagataaggagacaccaaatgagtaatcaaaacgaacatcaaactcagcctgtacagaattcagaggataccccgtccatcgctgccgataataccgacccctggagcagtggaaccagtgctgacaatgcaacgggttctgactggctggatgcccccgcaactgcggtacagcctgaacattttaatatcatggacccattccagcacccacttatccctttagactcatgggtaacccaggctattgattggattgtgctaaattttcgtcctgcatttcagggaatccgcgtccccattgattttgttctcagtggctttgaacaatgtctgacgtcaatacctgctcccattgccatcctattttttgccctgattgcctggcagttatcaggcattggtatgggtattactgctctaatttctctggtaattattggtgaaattggtgcgtggcacgaatcgatggtcactttatcactggctctgacatcgctattgttctgcattatcgttgggttaccactcggtatatggctggcacacagcaagagagccgcgaaaattatccaacctctgcttgatgccatgcaaaccacaccagcattcgtctatctggttccgattgtcatgctgtttggcatcggtaacgtgcctggagttatcgtcaccattatctttgctctacccccaattgtccgtctgacaattttaggcatcaaacaggttccagcagatctgatagaagcagccgaatctttcggcgccagccctcgtcagatgctgtttaaagttcaattaccactggctatgccaaccattatggccggtgtcaaccaaaccctgatgctggccctatcaatggtcgttattgcatcaatgattgccgttggtggtttaggccaaatggttttgcgaggtattgggcgtctcgatatggggcttgctacagtaggtggggtcgggattgttattcttgcgattctccttgaccgcctaacacagtcttttggctacagcaaccgggctaaaggcgtaaatcgctggtatgccactggcccaattggattagttacccgtttatttagccaaaaagcataaccttccaaaacacctatcaaaccacaattgtttggtaaacacatgatgactgcaacaggaggaaaaaccatgcgcaaaatagttatctgggctatatccctgtcatcactgataagttctcaattattcgctgtcgaattaccgggtaaaggtatcagtgtacaacccatacaaagcacccttagcgaagaaacattccagacgctgatcgtcagtaaagcattggaaaaacttggttatgatatcaaacccatcaaagaagtggactacaacgtcgcctattcctctattgcttctggtgacgcaacctttatggccgtaagttgggaaccactgcacaacacccaatatcaggcagcaggtggtaatgccaaattttaccgtgttggtaactacgtagaaaatgcagcacaaggctacttgatcgataaaaaaacagcggaaaaatacaacattactaatattgctcaattaaaagatccgaaaatagccaaattatttgataccaacggtaacggcaaagctgatttaactggctgtaatcccggttggggctgtgaaatcgccattaatcatcaccttaaagcctatggtttaaacaatagcgttgaacacaatcaaggtaactatgcagccatgatggcagatactattacccgctataaagaaggcaaacccatcttatattacacatggacgccttattgggttagtgacgtgctgaaaccaggtaaagatgttgtctggctgcaagttcctttctccgctatgcctaatgatgagaaaatagagacgaaattaccaaatggcgctaattatggttttccaccaagtattatgcatattgctgccaataaaaaatgggcagaagacaacccaaccgccgctaagttattttctatcatgagaatgccccttgcggatatcaatgcccaaaacttgcggatgcataatggtgaggcatcaccagcgaatattgaacgtcacgccaacggttggattaaggctcatcagaaattatttgatagttgggttaaaactgctgttgaagccgccggaaaaaattaatacttagaacattacagtgaattggtataaaacaattcactgttttttactgttattttttctgactcaaaattcttattaaaatttatatttcaacaattttatagtcattatcgctgtattatagagaaataataagaattaatatcgttttcacatttcattctcagttcaatttggtagttaaatcacaaggttaaactacctaaaacaatgaatactcatggagtttctttaacaaccattctctcggctttaccattgaacctgaataaaaattcattacaatgcaaaaaatttagctcgtgacgacagaccgttaacgagctgtccactcaccctaacctaccgtttaaatataagaaaatacattatatggaagaaaatatttcccgtacgccattaagcccagcgttgattgcactaatcgccattgccacaggtctggttgtcgccagcaactattatgcacagccgctactcgatactattgcgttacaatttaatctgaccgtcaacgaagccgggtttattgtaaccacagctcaattgagctatgccgttggcctaacattccttgtgccattaggtgatatgttcgaacgacgcagtttaattgtctcaatgacaatattagccactattggattactgattaccgccacgtcacagaacatctggcaaatgttactgggaacggcaatgacgggcttattttcggtggtcgctcaaatactggtcccgctggccgcaacacttgctcttccccatcaacgaggaaaagctgtcggtacaattatgagcggtttactgcttggaatattactagcaagaaccatctcaggaacaatggcaactcttggtggctggcgaactgttttttgggttgccagtgtcttattggtgattctttctctgacgttgtggcgctacctgccccgttacaaacaagtaaccaatctcagttatttccaattacttggctctattgtaaaccttatcactacaagcccgcttctaagagtacgcgccatactgggtgcactgacatttgccaacttcagcctgctatggacatcaatggcattcctgctttcagcacctccttttaactattctgaaggagtcatcggcttatttggattagtcggtgctgccggtgcattgatggcaacccaaaccgggcgactcgttgataaaggaaaaggccctctgaccaccagcatttctctggtgctattacttctttcatggataccgatcggtttagtcaaagaatcactaattggctttataattggtgtttttctccttgatattgcgattcaaggagttcacgttacaaatcaaagtacaatataccgcatcatgccagaagccagaaaccgactcaccgccgcttacatgactagctattttatcggtggagctcttggctctctggtttcaggctatgcttacaaacactcaggttggtatggcgttgccaccgcgggtatagctatctgtataatcagcctaatcgtgtggtttttaggcaaaaagtacgaaccaaagacgttgtaagaaacaggtcatagtaaaagaatgcttaaataaaaacatttatgaaacatttgttaaggatgatattctctatttggtttcattttgttaatgttacataacattcacataaccagatagattctatgcctgtttctgatacatcatcccccttaacgagtaaaaaatcttcttttactgaaggaataatagatagtttacccattgttatcggttatattcccgtcgcctttgcttttggtctcaatgccgtcaaacttggcttcaacccaatggaagccattttcttttcatgcatcatctacgccggtgcaagccagttcgtcatcacagctttactgagtgcggggacatcattatggatttctgccctaacaattatggcaatggatgtccgccatattctttatggtccatctttaaggcaccgtatcaaagataagctaacggagaaaaaaaccgttatctgggctttcggcctgacagatgaagtttttgccgccgcgactgcaaaactcattaaaaaccaccggagctggagtgaaaactggatggttgctattgcaatctgttcttggctggcctggggcgcaggtaccgcagccggtgcatttcttggtaacggttatttggaatcctatcccgctatagaagctgccatgattttcatgttaccagcactatttctcagttttcttcttgcttcttgtagaaaacaaaatagttattgtgttgcaaccgcactaaccggagcacttttagggattacatttttctcaattccagttgctattctggcaggtattgtcggtggttgtatcgcggcactgttacaaccgcaaaacaattgcaatgactcttcagaacaaaaggaaacaccatgattgatagcaagattttgctgattggactatttgttgggttagctaacttttcatttcgctatctgccactacgatttgggaaagcacgccaatctgccggcagaaaagctggaaaaacaagcattatccttgacagtattggtattgcatccatttgttctttactcatcgtatcaggtgtacctgatgtgatgagagaaagtcaaaaactacttcctaccctcataggttgtctgaccatctgtttagtcttttacaaaacaaagcaaattatactcgcaacactatttggcgcactgctttttggactaacattcaaaatatttatgaattaggtatcaatatcaaaagaaatatgatgataacaaataactacaattgctaaatttatcttttaatataccatttggatgtttgataacaaaagttatcttaccagttgaaactaataaggtatctaaataatggaaagttcgtttacgcctaccgaagaattactgaatattcgtgcagcacagcaagccaaattaaataaagatatcccttatcaagagatcctgttgactaggttatcaatgcacgtccaaagtaaattgcttgaaaaccgtaacaatatgctgaaagctcaaggtatcaatgaaactttgttcatggccctgatgatccttgatactaaagaaagccacagcatccaaccatcagaattaagtgccgcattaggttcttcccgtactaacgccacgcgtattgctgatgaattagaaaagcaggagtggattgagagaaaggaaagtcataacgatcgccgttgccttcatcttcatctgacagaacaaggtacaaaatttttaaatagtttgcttccacctcaacatgagtgcctgagaagactttggtcatgtcttgaccaggaggaacaaaaacagttagaaaagttaatgagaaaattactggtcagacttgatacaatgggcgattgtatcaaaaaatagcttgttgtttaatcgatcaattttcacccaaacaatactttcttggttaaattgttcgaaaaaattttcctgttagccaagatgatattttctgcaaaaagctaactattattcttcgataacattggatcctatgtcattcacctttccagtagtgatgctataccactactgggaagtgatctcaaaaatagtcttactagaagataaaacaacaagcatggggatttactatgagcgaaaatgaggcaatagaagtacaagcggcacaagatccaaccagtagtaaaaaaaggcaacgcagtcgtgccttagtgctactaacccttatctttaccctgctcggtgttgcctactttttctattggtttctcattttacgccaccatcaagaaacagataacgcctacgttacaggtaatcaagttcagatcatgtcacaagttgctggcagcgtaattacagttaactttgataatactgactttgtgaaaagcggcagtatattggtgcaactcgatccccgtgatgcagaattagcattagaaaaagcaaaaacaacattagccaacagcgttcgccagactcatcaacagatagttaacagcaaacaatatcaggctaacatcgctctacgcagatccgaattaactaaagttcaaaatgatcttagccgtcgtgaaatacttagcgttcaaaaagtcattggtaaagaagagttacaacatgcacaggaagctgtcgccagtgcccgagctgctctagatattgcaattgaacaatacaacgctaatcaagcaattgtcttggatacacccctagagaaacaacctgccattgaacaagctgcaacggaagtccgtaatgcctggctggcattacaacgcacgaaaatagtcagcccaatcgatggttatgtctcacgccgtagtgtacaagttggtgcacaaatcaataaaaatactccactgatggcgatagtttcggcaaacgatatgtggatcgaagctaacttcaaggagacacaaatttctggtatgcgtattggtcaaccagtggaaatcaccagcgatttctatggtggaagcaaagtatttagcggcaaaatcactggccttgatatgggtaccggcagcgccttctctttattacctgctcagaacgccagtggtaattggattaaggttgtacaacgtttacccgtccgtattgagcttaatcctggacaactagaaaaatacccattacgcatcggtctctcgactaaagtcagagtagatactacgagccctgatgggcccgttctgtctgataaaacacgcactaaatcagcttatcacaccactgctctgacaatagatatgtcgcctgccaataaaatagttaacaacattactaatagtaatgctggaaaataatatcggaggccaaggtgatgagacagccgcttacaggtgccaaacttgcatggatgaccatagcgctatccttagcaacgttcatgcaagtgttagattctaccattgctaacgtagcgatacccacgatttcaggtaacttaggatcatcaagttctcaagggatctgggtaattacctctttcggggttgccaatgcgatttctatcccaattactggatggctggcgaaacgcatcggcgaggttaagttattcatctggtcaaccgcgctattttccatcgcttcttggttatgcggtatttccaacagtcttggtatgctaatcttcttccgagttattcaaggattagttgcaggtcctcttattcccctttcacaaagtctactcctgaacaattatccaccagccaaaggaaatatggcgctggcattatggtcaatcacgattatcatcgcgccaattttcggccctattctgggtggctacatcagtgataactaccattggggatggattttctttatcaacgttcctgttggtatagcgattattttgattgctatgcaaacgctgaaagggcgtgaaacccagacagagatcaagcctatcgacacaataggactcatgttattagtggtcggcgttggttgtttacaaatcatgctagatcaggggaaagagctggactggtttaattctacagaaattatcgtcttgacagttattgcaatcatctcattaacatttctggtggtatgggaactgaccgataataacccgattattgacctatcactgttcaaagagcgcaattttaccattggttgcttctgtttgagcttagcttatatgctctatttcggcaccattgtgttattacctcagttattacaggaagtgttcggttatacagcaacctggtcaggtcttgcatcagcaccagtaggattgttgccactaataatttcgccactgattggtaaatttggcaataaagcagatatgcgctacatagtgacattcagttttgttgtctatgccatctgttattactggcgtgcatatacattcgaaccaggcatggattttgccgcggtcgcatggcctcagtttatccaagggtttgctattgcctgtttctttatgccactcacaaccattaccctttccggcttgccagcagagcgggtggcatctgcatccagtttatcgaattttattcgaacactggcgggttcaataggaacatcactaacgacaaccatgtggacccaacgcgagtcaatgcatcattcccattttactgaacatatcaatccttatagtcccgatactcaacggatctatcaacaattatcggaattaggcatgaataaccagcaaatttctgcttatctagcaaaagaagttacccatcaagggctcataatctcagcgaatgaaattttttggctttccgccggagtattcctgattttgattatgctcgtctggctagccaggccaccatttacccaaggaagtaaagaaggcatgagcgcagcccactaaatcttaaatagcaaaaccgggagcacactccagctcccgcttttcctaatcaagctttattctgtcgccaccattcagccagcataatgcccgttgcaacagaaacgttcaggctttcaaccaaacccgacccaccgacgaacaaactcatatcaccatgttcccaagcactgtcactcaaaccatcgcgttcttgaccaagtaccagaaccattttttccggtaattcagctttagctaaagcggtactacctttatggctggatgtcgtaacaatggtgtaacccgctttacgaaagttattcagcgtagtgaccaagctatcagcatcaatacctttaatatgctcagcaccaccttctgctgtacgaatagccgcgcccgactccagcaaggccacatcctgcaaaatcaccccttgcacaccgaaatgtgcacaacttcgcataatcccgccaaggttatgaggattacccacatcttcaagagccaaaacacaatcttttactggagcatctttcaagtaggtctctgcatccaaaccgttgcgtttcttaatcagaaaacaaacaccaccatgatgttcagtacctgacacttttgtcagttcagcctcatccacaacatgataggctttacgattagcagccatccatttcagcgcattgcggaaacgtggtgtcactgactcaacgaaccatgcacgaactatcgcttcagaacggtttttaaacatcgcctgacaagcattttcgccataaatccgagtttcttccattcgctgacgacggagctgttcaggatcaatctggcttttcccactgataccaccatgcattggcgttacagaatcactctcagggcgtgacactgttttccaaggcgatctttcacgctcattggcacgcggagaacgggatgttcgctcattgtcccgacgacgctgaccctgatcacgtcccttaccagatggacgtttgttattattacggctgtcattaccgccctcactgcggacatacatcactttgactttgccatttttaccactgtatgaatcgttcattcgtttctccaactgctttatggcgcgaagattacctgatgtgcgcatcttaagctacctctgacaactataatccattaaaatgcgcccttaattttcctgctttcggcgagacatgccgtacttgctatggagggcacagtctggctacctgttgaaacagcccccaccgaagatattcaagctacagcttggtactattttgcaacaaactggcaatttaattacttctcagcaactgcatccgatagcgtaaatcacagcaacaatttgcgaaatccgctacagttatcgactaaccccacgaataaggagcctcctgatgagccagcgcggacttgaagctttattacgccctaaatccattgcggtaattggtgcctcagaaaaaccagaacgagcgggttcagttatgatgcgtaacttgcttgcaggaggctttgccggaccaatactaccgattacacccaatagccgttctgttcaaggggttttagcttacccttcaatagataaattaccgattacaccagacttggctgttatttgtactcatcaccgccgtaatttgcaatgtttagaacaactggggcagttgggttgcaaaacggtgattatcctttcttcaccaacgtcccaattcgctgaactaaagcagtgctgccagcactatagtatccgactacttgggccaaacagtttaggtgtattagccccctggcaagggctgaatgccagcttttctccggttccaatactcaaagggaaattggcctttatttctcaatcggcggcagtctcaaatacgattcttgattgggcaaaacaccggggagtcggattttcctactttatagcattaggtgacagtgtagatatcgatatcgatcatctgcttgattttctggctcgtgacagtaaaaccagcgctatcctgctctatttagagcatattcatgatgcccgtcgctttctttcagcatctagaagtgcttcccgcaataaacctattttggtggttaaaagcggccgtactaagcgagcacagaaattacttggtgaacaacaaaatttggatgcggcttatgatgcagcaattcagcgagcagggttattacgcgtacaagatacacatgaaatgttttctgctgtagaaacgttaagccatatgtcacctttacggggagaacggctatttatcgttagcaatggtgcttctccagccgcaatggcgctggatgcgttattccgccgtaacggcaagctcgcaatattaggtgaagagacaacgaaagcattaaaaatacaactcccagaaactatctctctgcataacccgctagatttaaaagatgactccacggtggaacgttatatcgctgcgttaaaaccgttactagatagccacgaccatgatgctctgttacttattcactctcctagcgcaattgctccctgtattcaaactgcaaccaaagtcattgaaacaatccgtaaacacccacggggaaaatggctaactatctttaccaattggtgcggagaatactcttcacaagaagcccgccgtctgttcagtgaagcaggtattccaacttatcgcacccctgaaggcgcgattactgctttcatgcacatggttgaatatcgccgcaatcagaaacaattaacagaaacccccgcactaccagcaaacatcacagctaacacagcacgtgcccatcagtgcatacaacaggctctggaacagggaaattctcggctggatacccatgaagttcaacctattctggaagcttatggtctcaatacattgccaacatggattgctcataacagtgatgaagcagtcaatattgcccaacagatcggttatcctgttgcgttgaaattacgctcgccagatatcccgcataaatcagaagttcagggagtcatgctctatttgcgaaatgcaaatgaggtcaaggcttctgctcaagcgattatcgaacgcgtcaatcagaatttcccacacgcaagaattcaaggattgttagttcaaagcatggcaaaccgcgctggtgcacaagagctacgaattgcagtcgagcaagatgaagtatttggcccactgattatgttaggtgaaggcggtattgaatggtcacaggaaacacaagcagccgttgcgctgccacctcttaatatggcgttagcgcgatatctggttattcaggcgattaaaagtagaaaaattaagctcaggggagctcctcaatcattagacgtactagcactcagccgactgttagttcaagtatcgaatctgttacttgattgcccgcaaattgtacgactggatattcatccattactggcttctggcgatgaattcacattattagatgtttcaatggaattatcttcgatagacggtgatccacgaactagattagctatccgtccatatccaagcgaactagaagaatctataaaactcaaaggaggtgcagaatgcctgctacgtccgattctgccagaagatgaaccgctgctgaaagatttcatcggccaggttacgaaagaagatctctattaccgctactttagtgaaatcagcgaattcacacacgacgatctggccaatatgacgcagattgattacgaccgtgaaatggcatttgttgccgtacgacatcctaaaacgaccccagaaattatcggggtgactcgtgccatagctgacccagataatgtcgaagcagaattcgctgtgctagtgcgttctgacttaaaagggatcacccttggatatcaacttatgataaaactgattaactatacacgggaacatggcataagccgcctcaacgctatcaccatgccagaaaaccgtacgatgataaaactggctaaaaaactgggatttaccatagatgttcaatttgaggatagcattgtaaacttatccctcgaactctaaatcaactacgtgatggaccgcacagacttgaatcattaggcattagagcgttaaatcatgctcacaattagccagactaatggtattatcgccagatcatttgatgcattgctttacatagtagtcctttagccatctaacataagagaaaaagcgcactgtgatgttgtctaaattcaaacaagctaaacatcaacaacaccttgcacaactgcctaagctacctcagtcagttgctgatgttaaaacactttatcaacctgaagtgttccgcagcaccctgctggaaaaaattgctaacgctgaaaaacatatttatatcatctccctctatctggaaaatgatgacgcagggaaagatatccttaatgcactttatacagctaaacaacaacgcccagacttggacattaaagtgctcgttgactggcatcgagcacaacgtggacgaattggtgctgctgcaatagtaacgaatgccgattggtattgttctatggcagaagcttatcctgatgtgaaaattccagtactaggtgtacctgtaaatacccgcgaagcactgggtgttttacatttaaaaggttttatctttgacgatactgtagtttatagcggagcaagcattaatgatgtttatctccaccaacatgataaatatcgctatgatcgctaccacttgcttcacaatgcagaacttgcagaagcaatgaaacactttattgataatcacattatcgctacaggagccgtgcagaaactggattgtaaaaaccgtcctcgtattcctgaaattaaaaatttgatccgtcaattacgtttttctctgcggcacactacctataaaataaacaatcaggcaacgaatgatgaactatctgtcactccacttgccggtctgggaaagaaaaatctactaaataaaaccattagtcatctgatcgccagcacagaacaaaagctgattatttgcactccgtattttaatcttccagccatcattgtccggcggatcgttcatctacttcgtaaaggtaaacatgtggaaattattgttggtgataaaactgccaacgatttttatattccaccggaagaaccctttaaaattatcggtgcattaccctatttatatgaaattaatctgcgccgtttcatcagtagactacagcgttatgttgacaacaatcaactgactatcaggttatggaaagatggtgataatagctaccacctaaaaggtgtgtgggtggacaatcaatggcaattgattacaggaaataatcttaatcctcgtgcctggggactggatttagaaaatgccattcttattcacgatcctcataaagaaatgcaggagcaacgtacaaaagaactgcactgtatccgtactcatactacggttgtcagtgattatcaggaattggacagcatccagctttacccagtcaaagtacgtaaacttatccgccgtttacgtcgcatccgggtagacaaactgattagtcgtattctgtaattgaatcgataaagcgaattatcttttctaaataaaatctcctgatattgaataatttcgggagatttttaccatcgaactttaatttgataaatctcaaattttcttaaataagagtaatattcaaaagtacgtaaatctagatttatacccgttatctttcaagttgcctctttgttggctgcgcgctctcaccccggtcacatcgttatctatgctcccggggattcgctcccttgctgtcgcaatgcatcttgaaattagggtatagagagaaatttttgtcatgctcggctaagcttaggataacatgactcattttctttcccatcagttcaaaaagttatttaaattattttttatgcctgctattactataatatattttaattattcaagactgataaacaaactatctgtttcttaaagggaataagtaaataaataataccttaaaacgcaaaaacccccagctttcgctgagggtttctacggtatttaaagcctggcagtgtcctactctcacatggggagaccccacactaccatcggcgctacggcgtttcactgctgagttcggcatggggtcaggtgggaccaccgcgctatcgccgccaggcatattcggttttcttccggccgttgtcgctcttctgccacaaccacccgaatcaatctctgaacaagcgaaaaatctctctctgctgtcttccgacaccaaaacaccttcggtgttgtaaggttaagcctctcggttcattagtactggtcagctcaatgcatcgctgcacttacacacccagcctatccacgtcttcgtcttaaacgttccttccgtgacctcagtcaggggaagactcatctcaaggcaagtttcccgcttagatgctttcagcggttatctctcccgcacttagctaccgggctatgccattggcatgacaacccgtacaccagcggtgcgtccactccggtcctctcgtactaggagcagcccctttcaatcttcctgcgcccacggcagatagggaccgaactgtctcacgacgttctaaacccagctcgcgtaccactttaaatggcgaacagccatacccttgggacctacttcagccccaggatgtgatgagccgacatcgaggtgccaaacaccgccgtcgatatgaactcttgggcggtatcagcctgttatccccggagtaccttttatccgttgagcgatggcccttccattcagaaccaccggatcactaagacctactttcgtacctgctcgaaccgtcactctcgcagttaagctggcttatgcctttgcactaacctcacgatgtccgaccgtgattagccaaccttcgtgctcctccgttaccctttgggaggagaccgccccagtcaaactacccgccagacactgtccccggcccggtttacgggcccaggtgagaacatcgaacattcaagggtggtatttcaaggatggctccatgcagactggcgtccgcacttctcagcctcccacctatcctacacatcaaggctccatgttcagtgtcaagctatagtaaaggttcacggggtctttccgtcttgccgcggggacactgcatcttcacagcgagttcaatttcactgagtctcgggtggagacagcctggccatcattacgccattcgtgcaggtcggaacttacccgacaaggaatttcgctaccttaggaccgttatagttacggccgccgtttactggggcttctgtcaagagcctcgccttgcggctaaccccatcaattaaccttccagcaccgggcaggcgtcacaccgtatacgtccacttacgtgtttgcacagtgctgtgtttttaataaacagttgcagccagctggtctctgcgactggcttcagctccggaggcaaactccttcacctaccgccagcgtgccttctcccgaagttacggcaccattttgcctagttccttcacccgagttctctcaagcgcctgagtattctctacctgaccacctgtgtcggtttggggtacgattcaatatgacctggtgcttagaggcttttcctggaagccgggcatcaaccacttcaccgccgtagcagctcgtcatcacgcctcagtgttcacagaagagcggatttgcctgctcctcccacctacacgcttaaaccgggacaaccgtcgcccggatggcctagccttctccgtccccccttcgcagtcacattcagtacaggaatattaacctgtttcccatcagctacgcctctcggcctcaccttaggggtcgactcaccctgccccgattaacgttggacaggaacccttggtcttccggcgagcgggtttttcacccgctttatcgttacttatgtcagcattcgcacttctgatacctccagcaggcctcacagcgcaccttctccggcttacagaacgctcccctacccaataacacttgcgtgtcactgccgcagcttcggtgcatggtttagccccgttacatcttccgcgcaggccgactcgaccagtgagctattacgctttctttcaatgatggctgcttctaagccaacatcctggctgtctgggccttcccacatcgtttcccacttaaccatgacttcgggaccttagctggcggtctgggttgtttccctcttcacgacggacgttagcacccgccgtgtgtctcccgtgataccattcttcggtattcgcagtttgcatcgggttggtaagccgggatggccccctagccgaaacagtgctctacccccgaagatgaattcacgaggcgctacctaaatagctttcggggagaaccagctatctcccggtttgattggcctttcacccccagccacaggtcatccgctaatttttcaacattagtcggttcggtcctccagttagtgttacccaaccttcaacctgcccatggctagctcaccgggtttcgggtctataccctgcaactctttcgcccagttaagactcggtttccctgcggctcccctatccggttaaccttgctacagaatataagtcgctgacccattatacaaaaggtacgcagtcaccctgattaatcacggctcccactgcttgtacgtacacggtttcaggttctctttcactcccctcgccggggttcttttcgcctttccctcacggtactggttcactatcggtcagtcaggagtatttagccttggaggatggtccccccatcttcagacaggatttctcgtgtcccgccttactcatcgaactcacagccataccatcttcgagtacggggctgtcaccctctctcgccggcctttccagaccgttcctctgatgctatcgctgatgcaggttctgggctcctccccgttcgctcgccgctactgggggaatctcggttgatttcttttcctcggggtactgagatgtttcagttcccccggttcgcctcattaacctatgaattcagttaatgatagtgcaacgcattgcactgggtttccccattcggacatcgccggctctgtcgcttcatatcagctcaccgacgcttttcgcagattagcacgtccttcatcgcctctgactgcctaggcatccaccgtgtacgcttagtcgcttaacctcacaacccgaaactgtctcggactgttcagcttgagagacacctcaacaatacctcgggggtattattgagtatttcaatttttcagcttgttccagattgttaaagagcaaaataattcgcagcatactgtcgccaatatactctgaattaggttgaatatggtggagctaagcgggatcgaaccgctgacctcctgcgtgcaaggcaggcgctctcccagctgagctatagccccatacagaaatagaccgtcatcgcctgttcagtcaactcgcttaacctccggggatttcaacgcgagtaacgcagtgtgcgcgagcacatgagtcacgcagcgtctggaagacccagggataagtagagttggtaggcctgagtggacttgaaccaccgacctcacccttatcaggggtgcgctctaaccacctgagctacaagcctatcgcgataacgttttctcttctttcatcagacaatctgtgtgagcactgcactcaacctctctcaggtaaggaggtgatccaaccgcaggttcccctacggttaccttgttacgacttcaccccagtcatgagccacaaagtggtcagcgcccccctttcggttaagctaccgacttcttttgcaacccactcccatggtgtgacgggcggtgtgtacaaggcccgggaacgtattcaccgtagcatgctgatctacgattactagcgattccgacttcatggagtcgagttgcagactccaatccggactacgacagactttgtgtgttccgcttgctctcgcgaggtcgcttcactttgtatccgccattgtagcacgtgtgtagccctactcgtaagggccatgatgacttgacgtcatccccaccttcctccggtttatcaccggcagtctcctttgagttcccaccttcacgtgctggcaacaaaggataagggttgcgctcgttgcgggacttaacccaacatttcacaacacgagctgacgacagccatgcagcacctgtctctcagttccctaaggcacttcgctgtctccagcaaattctgaggatgtcaagagtaggtaaggttcttcgcgttgcatcgaattaaaccacatgctccaccgcttgtgcgggcccccgtcaattcatttgagttttaaccttgcggccgtactccccaggcggtcgatttaacgcgttagcttcggaagccaccgttcaagaccgcaacctccaaatcgacatcgtttacagcgtggactaccagggtatctaatcctgtttgctccccacgctttcgcacctgagcgtcagtcttcgtccagggggccgccttcgccaccggtattcctccacatctctacgcatttcaccgctacacatggaattctacccccctctacgagactccagtcaaccagtcttagatgccattcccaggttgagcccggggatttcacatctaacttaattgaccgcctgcgtgcgctttacgcccagtcattccgattaacgcttgcaccctccgtattaccgcggctgctggcacggagttagccggtgcttcttctgcgggtaacgtcaaagtccagccctcttcaggctaaacccttcctccccgctgaaagtactttacaacccgaaggccttcttcatacacgcggcatggctgcatcaggcttgcgcccattgtgcaatattccccactgctgcctcccgtaggagtctgggccgtgtctcagtcccagtgtggctggtcatcctctcagaccagctagagatcgtcgcctaggtaggccattaccctacctaccagctaatcccatctgggttcatccgacggcgtgaggccctttcaggtcccccactttggtctcgcgacattatgcggtattagccaccgtttccagtggttatcccccgccctcgggcagatccccagacattactcacccgtccgccgctcgtcagcaaaagcgcaagcgctttcctgttaccgctcgacttgcatgtgttaggcctgccgccagcgttcaatctgagccatgatcaaactcttcaatttaaagtttgatgctcaaagaattctgactaattatttcgtaatgaattaactgttgttcactcttcaagactttaaaacgtatttttttgtgatacggtcttgtgagtgcccacacagattgtctgattaattgttaaagagcaggctgacataaaaaataatattctcgttcagccgggctgcgtatactacgctgttcgcccgcagagtcaagcactgattatcgctttctctgcccgacctcacaatgtttatcagcgttgtgtcggtcagtggtggcgcattatagggcgttctttgacgctggcaagcatttaattacaaaaagaatccattcgaacatcaattaagcaaaaacaaggctagattgcgatttaatgcgcaatatgataaaaaaagaggcagtttcctgccccttatctctcgttaaatataacgttattgctttgctacgatatggctattttccacatccagagtaactggttttcctggcaatagttggccggaaagtatcttttgagctagtgggttttcgatttcctgctggatagctcgcttcaatggccgtgctccgtaaacaggatcgaacccggcttctgccaatatttccaacgcttgctgagtaatcgtaacctgataaccacgttcttccagtcgcttgtataaacgttgcaattggatatctgcaatcgctgacaaatgccgacgccctaatggatggaatacaacagcttcatcaatacggttaataaattcaggtctgaaattatggctaacaattcccatcactatatctttcatttcatcataatttagactaccaaaacgctcttggatcatgtccgacccgagattagaagtcatgatgacaaccgtgttacggaaatcgacagtacgaccttgcccatcagtcaatcgaccatcatccagcacctgtaataagatattgaatacatccgagtgcgctttttccacttcatcaagcaaaataacggaataaggtcgacgacgaaccgcttctgttagataaccaccttcttcataaccaacatatcccggcggtgctcctaccaaccgtgatacggcatgtttttccataaattcagacatatcgatacgcaccattgcatcatcgctgtcaaacaggaaattcgctaacgccttacacaactcagttttaccaacaccggttggaccaaggaacaggaatgagccaatcggccggtttggatcagccaatccagcacggctacggcgaatcgcattagatattgcattgactgcctcatcctgaccaatgacacgtttatgcagctcttgctccatgcgcaacagtttatctttttcactctcaagcattctggcaacaggaatacccgtccaacgagcaagaatgtctgcaatttccgcatcggtaactttgttacgaagcagtttcatatgcttactttcagcttgtgtggctgcggcaagttgtttttccaatccaggtatttttccatactgaatttcagacatcttcgctaaatcaccactgcggcgtgcctgttctaaactgatacgggcattttccaattccgcttttatgtgctgagtacccgtaagtgctgctttttcagctttccactcttcttctagttcagagtattcgcgttcttttacgagcagctcttcattaagcatttcaagccgttttttactggcatcatcagactcttttttcagcgcctgctgttccaacttcaattggataacccggcgttccaaacggtccagcgcttccggttttgaatccatttgcatacgtaaactggcacccgcttcatcgatcaagtcgatagctttatccggcaacatacggtccgagatataacgatgagataatgttgctgccgcgacaattgcagggtcggtaatttgtacatgatgatgtaactcataacgctctttcagaccgcgcaaaatagcgatagtgtcctctacggaaggttctgcaacatagactttttggaaacggcgttccagcgctgcatctttttcaatatattgacgatattcatccagtgttgttgcaccaacacagtgaagttcaccacgggccaaggcgggttttaacatgttaccagcatccattgccccatcagccttaccggcaccaaccatagtatgcaattcgtcaataaacagaatgacattgccttcctgtttagcaaggtcattcaacacacctttcaaacgctcttcgaattcaccacgatatttagcccctgctaacagcgcgcccatatccaaggaaaggactcgcttatttttcaacccctcaggaacttcaccattaatgattcgttgagcaagcccttccacaatggcagttttaccaaccccgggttcaccaattaaaaccgggttatttttggtacggcgttgtaatacctgaatggtgcggcgaatttcttcatcacggccaatcaccggatcaagtttgccttgttcagcacgttcagtgagatcaatagtgtattttttcagggcttggcgttgatcttccgctccctgatcatcaactttttcaccaccacgcatttgttctattgccttagtgattttttcttttgttgcgccaacagctttcaatatgtcacttaatgtgccacgttcttccaatgctgccagaacaaataattcagaggagataaaattatccccggctttttgtgccagtttgtcacacagatttaaatgacgaactaagtcattggatggttgtacatcaccaccaataccctgtacccgcggcaagcgttctaaagccagctcaagctgattgctgaaacggcccgcatcgattccaattgacgttaataatgggcgaatagagccaccctcttgttttaacagtgaactcattaagtgaattggttcgatgaactgattatcatgcccaagtgcaaaggactgggcgtcagcgagagcaagctggaatttattagtaagacgatccagacgcataacacctccaatactattcagaattttgctactggagattaaatgaggccattcctcaaatattcaaggttattctgaaaagcaaattgtgagatattctctcatgcgccaacggatcgccctacgggataggttatatcagccagattaaagttgccatacgtccggtgatcccatcacgacgataagagaaaaatttctctttattactgacagtacattcatccccgccaaaaatcgctttcacaccaacagattgcaattttaactttgccaacaaatagatatccgctaaatacttttcgccaaaaggtataaaagctcgactcaaatcagcatgctggatagtgaacgcgtgcaaaacttcattgcccacttcaaatttttccgcaccaattgccggccctaaccaagcttggatctgatgaggtttagcgttaaattgagcaatcgtgttttccagtacgccggcgcataaacctcgccaccccgcatgggcagccgcaacctcatcaccagccgaactgcaaaatagtacaggcaggcaatctgctgtcatcacagcacaaacctgcccaggaatatgggtataaacagcatcagctctattatcttccagtggctgaccattgagtctcacaacacgcgtaccatgaacttgttctagccagacgggttgctgaggcagttccgccattttcgctagaatatgcctgttttgttcaacaacatccggtttatcacccacatgcttacccagattcaggctatcgtaaggtgataaacttattccccctaagcgggtagaactacaggcttttattgtcgtcggttgtggccagtttggaaaaataagcgaagtcatttaccaatccatttcgtctttaaatgcttctgcatctgcttttaatgccttaatcagcatcaccatatcgtcaggtaattccgcatgccattccatttcaatgccggttatcggatgataaagacgcagcatcgtggcgtgcaatgcctgacgatcaaagttacgcattacctcgcgaaactcatcagaagcccctttcaaaggacgaggacgaccaccatataaaggatcgcccaccaacgggtgactaatatgggccatgtgaacacgtatctggtgcgttctaccggtttccagtctcagccgcagacgagtatgtgccctaaaatgttccattacccgataatgggtaatagccggtttgcccattggatgcactgccatatgtgttcgttttgttggatgacgagaaattggctcttcaaccattccacccgctgtcatacgacctgtcgccaccgcttcatattcacgggtaatttcgcgtagttggagtgattcgactaaacgcgtttgagcgggaaccgttttagcaataaccatcagccctgtcgtatctttatcaagacggtgaacaatgcctgcccgagggacatcggcgatttcaggataatgatataacagtgcattcaataccgtaccatctgggtttcctgctcccggatggacaaccaaatcacgcgatttatttatgactagaatgtcatcatcttcatagacaatatttaacgcaatattctgaggttcccaacgcgcatcttcttcaatgatggcatcaatggcaatttcttcacctcccaacactttttcttttggcttattgattaatttgccattaacctgaactctgtcatccaagatccaatcttttatgcgtgatcttgaataatcagggaacaattcagccaaagcctgatctaaacgttgaccgagctgagattcggcgactgttgtattaagtcgtatttgttgtgccatatattgtttctacacttacgttgagttttgacggcagagccgtttaatttaatatagtgtgctattgtaactcgatcttttgccgggagcttcatggatagtctcccagaaaaacactcagaggataatcaacacgtgatgatacgcataaaatatctggtggcggcagccacattgagcctggcactttccgggtgcgctggtaataagaatgctgtccccgacagcccacctgcggaaatttactctaagggtcaggaaaagctgcaaaaaggtagctatcccgatgcgatcaagcaattggaaaccctcgataatcgctatccatttggcccctattcgcagcaagtacaactcgatctgatttatgcttattataaatcctctgacctgccaatggctctcgcttctattgaccgtttcatacgcctgaatccaactcaccccaacatcgattatgttctgtatatgcgtggattaacttcacaagcattggataacagtccattgcaaagtttcttcggcattgaccactcagatcgtgatcctgaacacgccagggtagcattcaaggattttagtcaattagtacgctatcatcctaacagcctgtatactgccgatgctattaagcgtttaatgtttatcaaagagcgcctggcaaaatatgaactttctgttgtggaatattataacaaacgtggtgcctatgtcgcggtggtaaatcgaattgaacaaatgttacgtgattaccctgatacacagtcaactctcgaagcgctgccttacatgaaaagcgcttatacacatttaggtttaatcgctcaggcagataaagtagcaaaactcattgctgctaatccggtataaaaaagcagacaataaaacagcggttggtgccgctgttttatttttacttatcaaatcccaaaaagaccgcttatcaattaggatgaataaaagactcaacttgtcaatagtgtctcattagcttcaatcctgcaatagatattctccgtatttttaccactaatcacaattacttcaactagttgtctcatacctgatcaaatagtgatttagatcacctttttcatgaaaaagaaatgtatgctgaaattattgaaggtggataatcaataatgagaggtaactatatgatagtgaatattaccagcaaacaaatggagattaccccggcaattcgcaaccacgtcgaaaaacggttaaacaaactaaataaatggcgagtaaatctaataaatcctcatattattctatcaaaagggcctcaaatttttagggctgatgcaaccataagtacaccaaatggtatgttagttgccggtgcaaagcatgaagatatgtatattgctatcaatgaattattaacaaaactggagcgccaattgaataaagtacagcataagggagaagcacgccgtactgacaacagtgttaaagaatcaaaccttaatctagaaacaccactagaaacagaaccagaaatatcacaataaaataacaatgacttgcctctaacgcgtccaacttggacgcgttttttgttgacagaaacaacaacataaggttaattaacaaaaaccaccgtaaacccttatccagtgcggacggctgccgataacatgggaagcttcgcccgattgagcaaagagcagtcacacaaactatgaatatgagaatatgatgaatacagcgcctccccatcgggaggcttttttctgtccattgcaaacctaattattatcagaatgtaaggaacccatttatggatcaaaataatttgctgaaaatacgggaaaaagtcagcgaacttgatttaaagttactgattttattagcagagcgtcgccaattagcttttgatattgcccaaactaagttacaggataatcgccctatcagagacaaggatcgcgaacgagaactactagatgttctgattaaaaaaggaaaaagctacgggcttgatggcttttatatttctcgtctctttcagatgatcattgaagattccgtcctcactcaacaagcattattgcagcaacacctaaatcaaacaccccaagattcagcacgtattgcattcctcggtcctagaggttcctactctcatatcgcagcccgccaatatgccgcccgccatttcaatcaattaattgaatgtagctgccataagttccaggatatcttctccttggttgaaacaggccaagcggattacggaatgttacccattgaaaataccagctcgggttccatcaatgatgtttatgacttattgcaacataccaatttgtcaattgtgggagaaataaccattcctattaaccattgcctactcgttgcaacagacacaacgctatcggagatcaaaacggtttacagtcaccctcaaccattccaacaatgtagccaatatattaatcaattcccgcattggaaaattaaatattgcgaaagcactgccgcagcgatgcaaaaagtcgccgaacagaattcaccagaaattgcagcgttagggagtgaagcgggcggtgcactttatcagttacaggttctggaacagaatctcgcaaatcaatcacataatattactcgttttattattgttgcccgtcagcctatcgaagttgcagaacaagtaccggccaaaacgacatttattatggcaaccggacagcaggcaggagcactggtagatgcgctaatggtgctgaaaaaacataatattattatgagtaaactggaatcccgcccgatcaacggaaatccgtgggaagagatgttttatattgatgtccaagctaatattcgttcaattaatatgcaacacgttctgaaagcattggcgaaaatcactcattcattaaaggtattgggatgttaccctacagaaagcgtggtaccggttaacccctcctgattaaaaagaaccgggtattaaaatatccggttcagattattggcttttaatattttgattatcaatgagaaaacttttactgcctttaaccttcggtttaaaggctttttatttatttcgtaaaccccgactttctcaggctaaataatataggttatcgtttttcgtgccatctaaaaataaggaattaaaaaactcccacttattcacgtaggataaatacgttttatctgaatgtgataaaaccggtgttaataaaaaccacgttttatctatcaccacggttttaaaacctgggaaaaaacggcaagcatatcgtgaaaaagaaggcaaaaactttaatcattaaaggtaaaacagaaatgattaaagtttttttaaagcaagtaaaaaatccggtgttatactgacaccggaagagaaaacatcagaaaagacaagttttaaacttattaacaaggtgacaaaatgacaacattaaccatagaacaagaatatgagattgtatcaaaacatttatcaagaatgtccgtgttaagaagatttgctcaaacaaaagatgttgaatggttagaagatgtttacaaagcattagagatagtcgttcaagacagcaaagaaaccttcagattaatgagtttagaagcggaacaaaaagaacaaaaacgtttagaaatattaaggctgattgaagaaaccggccttaatcttaaaaccattaacatacctattaccctctctgattttaaacctaaaaaatcaaatgcaggaaaaggaaagacgagaaaacctaagtatcagtttaacgagaatggagaagttaaatactggtcaggaaacggaaaaaaaccatcaggtttacaaaaactactcaatgaaggtcattcattaaatgaatttttaattaaaaaataaaaaacctcagaatgagaataacctcacaagttttaatcttatttactttccttttttgcttgcattcgctttttggggcgttcgcaagcgcctttttatcggtgattaactcggttattaatcaaaaaagtgttaaaaaaacagatatccattaatgccaaatttttaaaaagtaaggggcatctaaataaagcctattcccgccatatttaatttattcatcagcgatgctatatcccaattattttacgaagcaagttataaaaataacgcaataaaaaagggtaaaacatggttaaacccgtataccgattaaatccagaagttaacaccatgacgtttaataataatttaaaaactgccgatcgtaaaaccatcagtaaaaaataagaaataaaaaccgattttgttaatgcttaaaacgaatatgattaatattcattgagcgtaaaacaccgacataccatgatggttaaacttaataaaaaagggcattaaaagagggaaaaacaactgttaaaagggggttaaaacacgattaaaaccgtatgccgattaaacccagaagttaacaccatgacgtttaataataatttaaaaactgccgatcgtaaaaccatcagtaaaaaataagaaataagaaataagaaataaaaaccggttttgttaatgcttaaaacgaatatgattaatattcattgagcgtaaaataccaacataccatgatggttaaactttaataaaaaaggcattaaaagagggaaaaacaactgttaaaagggggggttaaaacacgattaaaatcgtatgccgattaaacccagaagttaacaccatgacgtttaataataatttaaaaactgccgatcgtaaaaccatcagtaaaaaataagaaataaaaaccggttttgttaatgcttaaaacgaatatgattaatattcattgagcgtaaaacaccaacataccatgatggttaaactttaataaaaaagacattaaaagagggaaaaacaactgttaaaaaagggggggttaaaacacaattaaaatcgtatgccgattaaacccagaagttaacaccatgacgtttaataataattaaaaaactgcccatcgtaaaaccatcagtaaaaaataagaaataaaaaccgattttgttaatgcttaaaacgaatatgattaatattcattgagcgtaaaacaccaacataccatgatggttaaactttaataaaaaaggcattaaaagagggaaaaacaactgttaaaaagggggttaaaacacaattaaaaccgtatgccgattaaacccagaagttaacaccatgacgtttaataataatttaaaaactgcccatcgtaaaaccatcagtaaaaaataagaaataaaaaccggtttttttaatgcttaaaacgaatatgattaatattcattgagcgtaaaacaccgacataccatgatggttaaacttagtaaaaaagggcattaaaagagggaaaaacaactgttaaaagggggggttaaaacacgattaaaatcgtatgccgattaaacccataagttaacaccatgacgtttaataataatttaaaaactgccgatcataaaactatcagcgataaataagaaataaaaactgactttatcaatgcttacatacctcgaaaaaagacaaatgaaaatatgaataggtttatccgtttaccagaaaatatatctccaaaaagaagccgtctttaataacgttttcaaccggagaataaatccccctaaaccagttaaataatcgatgtaacaaaatccgcaaataaataatttaaccaaataataactcagttactttcggggttattagtcaacaaaaagaaccggatattgtcatatccagttatttttaattattggcgactatcattcgcttgttgaagcaataccctgctttccctcataaaacgaggtgcataatcaccaaaccattcactaacatcttcaaaactgctgacaaaagcccgtttgtcctggctttccaatatctctaacgcttgtccaaaactttgatgataacggcgtataagatcaatattctctggtgatgacataataatatccgcgtagagctggggatcttgcgcaaataagcgcccgaccatgatcaattccaaacggtaaataggtgaagatattgataacagttgttgtaaatccgccccttcctgtgcgagatgttgcccataagcaaatgtcgtgaaatggcgcaacgcctgaataaagctcatgtttttatcatgctgttcagggctcatttgatgcaagcaagccccccaaattaacaactgttctaaaaaccattgataagcttcctcttgacgtccgtcacagtaaacaacaacttgttttaccaaactaccgacatccggcccaaacataggatgtaatcccaacactggacctttatgcacatcaagcatagcctgtaatggctgctgtttaacggacgctaagtccaccaaaatgcaatggtcaggtaatggcggtaaacggcgaataacttcttctgtcaaatgaataggtacactgataatcaccatccccactcccgccagaatttgttccgcgttaggccaatcttgtggttccagatttctgacttcataaccagacaaagttaacaaacggccaaatagtttccccattttgcccaagccaccaacaatgactatcggccccaattgagggcaaagcgttttaaaccctttgttattctcactggtataagactcccgcataatgcggcgcagaatatcctcaattaaatccggtggaacaccaaactcttcggcctcctgccgacgtgaagcaagcatcgccatttctctgtcaggtgcataaattgacagcccattctgactttttacctcaccaatctctgcaaccaattccagacgctttgccagcaagcccagcaaagctttatccacttcatcaatcttatcccgcaattgagataattcagccgccatatttattatcccgcttttttcaatactgccattctttgcgacaattgcatgctaatttgctgatgtaattttcttagaactgcttctgtcgtctgccaactaatacacgcgtcagtgactgatacaccatatttcatttcactacgcggttgctcagaagattggttaccttcattaatatggctctccaacataatgccagtaatagattgattacctgaaatgatctgatccgcaacagaatctacaaccaaactttggcgacgaaaatccttattagagttaccatgactacaatcaatcatcaaggatggcaataatccagcctgcatcatttgctgttcacattccattacatgttgaacactgtaattaggggtcttaccaccacgcaagataatatgtccattcgggtttccttgcgtttgtaataaacacacctgccccgactggtttattcccacaaaacgatgtggcatagcggctgcacacatcgcattaattgccgtgttcaagctaccgtcagtcccatttttgaaaccaaccggcatagataaacctgaagccatttcccggtgtgtctgggattctgtggttctcgcaccaattgcagaccaactgaataaatcccccaaatattgtgggctattcggatctaaagcttctgttgcaagaggcaatcccattttcactaaactaagtagtaagcggcgggcaatatgcaggccagcttccacatcaaatgaaccatccatgtatggatcattaataagacctttccaacccactgttgttcgaggcttttcaaaatagacacgcatgacaatgtacaagctatcactcaattcagcagaaagagcggccaaacggtgagcataatccagcgccgcatccacgtcatgaatagagcaaggaccacacactaccagcaaacggggatcacggcgctgaataatatccgcaattgttttacgtgcatttgcaataacatgcagatcatcatcactcagtgggtattgttgctttaattcttttggggtgataagaatttgctcaccactgatgtgaacgttattaagtgcatctctttgcatgaacatgtcgattttctcctcaaattatcattctgtactcatttgtttttatgcatttgaccaataacatatcacgcgtcgtaaagaatacaatccaaaagtgtaaacaaatccaaaacactgtaaattattgtttacaaaaaataaaaaaagagtcaatttagtgataaatctattctataactaattaataagattaaaattatttcatatagaaaaatattataaatggttatcttaaaataaaatcaatatcaaaacacaagagagaaatattttaggcaatattttatgattattaaccctttatttcccatttaaaatcatcaggtaaaaatatatttacctcattttcattactaaaaatagataatatcaataatcttattttatatttcacataaagttactgaatagtgcccataaaatattatgaaaattatattgtgatgaaaaaatttatatcactcttttaaatttaatacactagggccggaaaatccggcctctttattaaaatacctgttacacagattaaagtaattgttacaaagcttgctgtaaaaaagcaattaattcctgattaactttatagggttgctccaatgtagaaatatgccctgcatcctggataataatatgatcacagtgcaatatttcagccatcaaataaccctccagaggcgggcgaggcgtatcttgttcaccagtaataacaagtgacggaatatctaatttttccaacaaatgagttctatcttcacgcccaaatattattctacctaacggaacaatactattgcgcaatatttccgcaggaatggcgaccagacgctgagttaattcatcaaccaaatgctgagccggttgctggctaaagaaggctggcactatctgctgttgcaaaatagattgaggaattgcaccaacctgctctatcgcatccaacatggcaacgtattttgtataagtcacttcaggttctaatccgacaaaggtatccatcaaaaccagtgctttaactctgtccggtgccatatcgaccaactcaattccccacataccaccagcagataagccaatgatagcgaattcttcaatgccaagttgatccatcaacgccaggtaatcccgagctaaatcagccaaagtgctatgttgttccggtaactcttccgagtttccatgcccccagagatcaggagcaatcacccggtattgtttacttaacgcctcgatctgaggtgcccacatagtagaatcaaacaaatagctatgtcccaataataacgggaaaccttcaccttcatctcggtaagccatttttttgttatgtatttgaaaagttttcaaagcaaatccttatagtcagttaatcacgtctgaaattattctatacccgtcatctttcaagttgcttctttgttggctgcactcactcaccccggtcacatagttatctatgctcccggggattcgttcccttgccgccgcgatgcatcttgaaatccatagggtataagactctcaaaataattgtctttaagattattacgatctgataataatgtattgccgaataatttatcgatgagtaaatatccttcttcataaaaggcaacattgatttcgttcctgaagagcgtaataaaaaaccctcccaaaacccacccgcattcaacctgattcttcactacagtcattaaaaatatagcagagccaaaaccaaattgatgaccacgcccgcaaaatacagtttaaattgacaaaacgcagttttaaattgagcgtaaaaaaagaggccagcacaattgctgacctctttaatgataactttcggatgtaacgaaagcgtattatttactgttcagacgctctttaatacgagcagctttaccagaacgctcacgcagatagtacaatttagctctacgaacagcaccacgacgtttaacgttaatgctgtctacgactggggagtgagtctggaatacacgctcaacaccttcgccgttagaaactttgcgaacagtgaatgcagagtgcagaccgcggttacggatagcgataaccacgccctcgaatgcctgcagacgtttcttagcaccttctacgacccataccttaacttccacggaatcacccggacggaatgaaggtacgtcttgcttcatctgctcttgttctagttgtttaataatgttgctcataataattctcttaccctaggtaaactgatatatcagagacattcccttcggggatatgtctggattaattagttgcttcagttagatgttcccgttggaactctgttagcaatatcctttgctcgtcagtcagagctaggttttccagaagttcaggtcttctaagccaggtccggccaagcgattgtttcatccgccagcgattaatttcagcatgatttccagacagcaatacgggtggaacttccataccatctaatacctccgggcgagtatagtgcggacaatccagcaatccatcagcaaaagagtcctcctccgctgatgcctgatgccccagaacgcccggaatgaaccgagaaactgagtcaatcatcgtcattgcagggatttcaccaccgctgagcacgtaatcaccgatagaccactcttcgtcaatctcggtttggatcacccgctcatctatcccttcatagcggccacaaatcaaaatcagtttttcatttgttgccagctcacaaaccccttgttggttgagtttgcgcccctgaggtgaaagataaatcacttttgcaccttcgcctgccgcagtttttgctgcatgaatggcttcccgtaaaggctgaaccatcatcaacatgcctggaccaccgccataaggccgatcgtcaacggtacgatgccggtcataggtaaaatcccgtggattccagcattcaatacttaacaggccatttttcactgcccggccagttaccccataatcggttattgcgcggaacatttcaggaaacaggctaataaccccaatccacattatcgcgtcccactcatttcaaccgcttataaccggagtttaaaaaccaggatcccaatctacttcaatagttttagtagcgagatcgactttcttgataacctgcccatcaagaaacggaattagccgttccttgacaccgaatgcatctttcaggtttgctttaactaccattacgtcgttagaaccggtttccatcatgtcattgacagtccccaagttataacctgcggtgctgattacctggcagcctattaagtctttccagtagtaatcacccgtatccagctctggcagttgttctgaatctacaataatttcgcaattagtcagtgaattcgcagcatccagatcatcaatacctttaattttgatgatcatatcctgattgtggtgtttccaggcttccagttcgatgtgttgccaccgacccgctcgttgaataaaccacggttgatacgcaaaaatgtcttcggcatgttcggtggaagaaaaaactctgagccaaccacgaataccatacgttgaacccagttttcccaatacaattgggtttacaggaagttcaatacaggtttgcttgctcatagttaccaccgcgacagattaagctacttttttggcgtctttgatcagtgtagaaacacgatcagacacagttgcacccagaccaatccaatgttcaatacggtccagatctaaacgtaatgcttctgctttccctgttgcaatagggttgaagaagccaacacgctcgataaagcgaccatcacgcgggctgcggctatcggtcacgactacttggtaaaacggacgctttttggcgccgccacgagctaaacgaattgttaccataacatcctcattagttaacaaaacaaccagacttcatcgaggaacgaagtccggttgtcagataaaaagcccgaaaagtttactcactttggcgcaaaaagcaatccaaagtggatattcttcgagactttatcgattaacggcccataaatccgggtggcatcatgcctttcataccacgcatcatttttgccagaccgccttttttcatctttttcatcatgcgctgcatttcatcgaattgtttaagcaagcggttaacatcctgaacctgagtgcccgaaccactggcaatacgacgtttacgagaacctttgattatttctggtttttgtcgctctttacgcgtcatggaattgataatcgcttccattttcaccagaattttatcatccatctgggatttcactgcatctggcacttgagacatccccggcattttgcttaacatgctggccattccccccatgttacgcatctgctttagctgatctagaaaatcatttaaatcgaagccgtcacctttttttaatttagaagccaatttttcggcctgagtgcgatcgactttactttcaatctcttcaatcagggagagaacatcacccattccaagtatgcgagaggcaatacgatccggatggaatggctccagtgcatccgttttttcaccaacacccagaaatttaatcggcttaccggtaatatgacggatggatagcgcagcaccgccacgggcatcaccatcgactttcgttaacacgacacccgtcagtggcaatgcttcattgaaagctttcgcggtattagccgcatcctgccccgtcattgcatcaacaacaaatagggtttctactggattgatggctttatgaacctgcttgatttcatccatcatagcttcgtcaacatgcagacgacccgccgtatccaccaaaagcacatcatagaatttcaatttggcgtgctgtaccgcttgagtcacgatatcaacgggtttttcctgagcatcagaagggtagaaatcaataccaactgcctgcgccaaggtttcaagctgtttgatagccgctggacgatagacgtcagcagataccaccaaaacttttttcttctgttttcctttcagaaagctgcctagcttggcaacgctggtcgttttacctgcaccttgtagacctgccattaatacgacagcaggcggctgagtagaaagattcagttcactgttaacttcacccatcgccttaacgagttcattctgaacaattttgacaaactcttggccgggagtcaggcttttattaacctcgtggcctaccgcgctctctttaacacatgaaataaaatcacgcactacaggcaatgcgacgtcagcttcaagtaaagccatgcgaacttcacgcagtgtctctttaatattatcttcggtcagtcgcccacggccactgatattgcgcaatgtgcgcgatagtctgtcggttaaattatcaaacattgtctctgctcaatttttaaaaatgggctacctgtaaggcgtattccgcaaattataacacgatggaaagggatctctgcacagagattcacatcgatgattaacaacggttggaggctatccttgctggcggtatacttaagctttaattcaacctaagactatcgctaaaacgactaatgctatgccagtattttctataatttcttcattcgcttatttattcagcctggtactgattattcccggcttgctgcggaaaccgaaaggataccgcaggctggcactactttccgcgattgtcgctttaatttgccatgcgattgcacttaaacaccagatattccacgtcagcagcgggcaaaacctcactcttctaaacctaggttctattgtcagtttactgacttgtatcataatgacaattgttgcttctcacggccgtgcctggttcctgctacccattgtttacagtttttccatgataaatttggtcttagcgagtcttatgcccggtgaatttatcacccatctggagaccagctttgaattatctatccatattgggttggcacttcttggttatgcaactttacttatcgctgcattatatgcattacagcttgggtggttggatcatcagcttaaaaataaaaagctcacttttacgccagatatgcctcccttaatgttcattgaacgcaaaatgtttcatatcacccagcttggcgtaatattgctaacgctgacgctctgcaccggcatcctctatatggataatattttcagtagcgaaaacatccataaagcaattttgtctattatcgcatggtttgtttacattgttttactatggggccactaccatgatggatggcgcggtaaacgcgttatctggtttaatctgatcggcgcatttaccctgacactcgcctatttcggtaatcgattattacaggaaatcatggtttactagcagtatgatgttcaatcaatacttggaaggaattctgctttggagcatgtctcaacaagcacattactgattattttaatcatcatggtcattgtctcagcttatttctccgcttccgagacaggtatgatgacaatgaatcgttatcgcttacgtcatctggcaaagcaagggaatcactctgcccgcagagttgaagcattacttcgtcatcctgagcagctcatcagcctgattcttatcggtaacaatctggttaatattcttgcctcagcactcgcgactattattggtatgcgtctttatggcgatgccggagttgctatcgcaaccggtattctgacctttattgtgctgatattttctgaagttatgccaaaaacgatagccgccctctatcctgaaaaagtcgcttttccgagtagttttttgctccgcccgttacagaaaatcatgctgccgttagtctgggtgctaaataaaattactttattgttaatgcgttgccttggtatcaaacaacctactggctccagtcacgcaatgagtaaagatgaacttcgcactattgtgcatgaatcaaatgccaagctatcacagcaacatcaggatatgctgatttcaattttagatctggaaaaagtcacaatcggcgacattatggttccccgtaatgaaattgttggcattgatattaatgatgactggaaatccatcattcggcaattaactcattctcctcatggccggatcgtgctttaccgtgattcacttgatgatgccattggtatgcttcgtgtgcgtgaagcttaccgattgatgacagaaaaaaaagagttcaccaaaagaaacctgatcaaagcagcagataaaatctactatgtccccgtcagcacgccacttaatatccagttagtgaatttccaacgtaataaggagaaggccgggctcatcgttgatgaatatggtgatattcaaggtctggtcactgttgaagatatcctcgaagagattgtcggtgattttacaacatcaatgtctccttctctggcagaagaagtttcaccacaaagcgatgggactattttggttgacgggacagccaatatccgcgaattaaataaagccttcaactgggcattgcctgttgatggaccacgaacggttaatggtatggtgcttgaagagttgggagaaatacccgcacttaatgtacaagtgcaaatcggcaaatataattttgaagtactttcagtgaacgataatgtcattaaacaagttcgcgtcactcccatcagcctattttctgatcaaaaagcacaagtcatttaaatcgctgcggaaaattgacaccgttggaggcgcgcacctccaacggcaaattcctgttaataatctcaggaacccgaaatattatcactactatggaactacactttcaattcggtcagtttttcttctggcaatgctaactcatcattcttattaacgaggacgtctgaatcaagaatatgatgtgcaatatcctgagcctctgtcagtgaatgcatgtgataagtaccgcattgataaatatttagttccgggatctggctctgatctttcactttcaagacatcagccatagccgctttccatgcgtctgcaacacgtacttctgccggttcgccaatcaagctcatataaaaacctgttcgacatcccattggcgatatatcaataatttcaacgccctcaccattgaggtgattgcgcataaaaccagcaaacaaatgttcaagtgtatgaatacccttttcaggcataacctgtttattgggtatgcagaaacgtaagtcgaaaactgtgatggtgtcgccatgaggcgttttcatagtcttagcaactcttacggctggcgcattcattcgagtatggtcaacagtaaaactatccagtaaaggcatttcttcatctccacaaaaaattcagatttttcttcaagcaaatgaaactttttcatctgccaccggtcataaagaatgaaacacgcgtcactattatccctattctctagaaaaccctctttggccacttttacttgtggtcattttcttttctagcatcctgtctgttgtttcagatactcatcaaaactcatcgtatcctcacgttccaacgcgtcttgtcgctctacagaggccctgcgttctatagcaaactgttcgtcgctaataacctcatatttttcactgatcagttgctgatggtattcatctgctagttccagtccaaagccaccaatgccctgactcttcattttttccagcacgcgagctgataaagtcagtgatgaatcatcaaacgtagcaattaattcttcgcaaaccttttgatactgcgtgccagaacaactatccaatattgcagcaacccgtttcaagtcactaaataactttttgccaacttttgctaacggctcttccacacttccacaaccaagaccaatcatttgcccaggtttacgcccttcaaggatcactctattccagttcttacggcaacaatctaattcatcactgcccatttccggcgcttcggcaagcacacaccatattaagaataggtcaagaaaacgaatttgtgtttcattgacaccaatcgcggcaaatggattaatatctaatgaacgaacttcgatatattccactcccccacgcaacaaagcgtcagaaggcgattcattccctctagtgacacgcttaggtcggattggcgcatacaactcattttcaatttgtaagacgttggtattgagctgaatatgtttatcaccttgcttagtgcccaatttagcaaactcgtcagatggcttgtgaatcgcttttttcagcccgtcaatataggtatgtaagttattaaacgtaatattcagatcgctctgtgatttattggtgtaccccaagttactcattcttagtgaagtcgcataaggcagataacaagttccatcttctgtccgttcaaaaagaaaagaagtctctcttccacgtaagaacgaggaacaaattgccggagaagcaccaaacaagtatgggatcacccatccaaagcgataatagttacggatcaaacggaaatagccattagagatctgttctttaccactctctgcatcttcaacaccaacccaagcacgccaaaactcaattggcaatgaaaaattataatgaaccccggatatggtctgcatcaacgcgccataacgatttttcaacccttcgcggtataaagtcttatagcgaccaacattcgatgcaccatattgagccagagtaatgttctcttccgcatcaataaagcatggcatacttaatggccacattttttctttgtccagcacacgcgccgtgtgacgatgaatatcgctaagaaaagaaatcgtatattttatatcatcaccagctggtgttatgaattccaacaatgactcagcaaagtcagtagtaatccatttatgcgtaagcgctgcaccaagtgttttaggatgttctgttatggctaaactaccatctgaagtaatacgtaatgtttcacgttcaacaccgcgacgaattccctttaaaattgtcggatgcgcctctagccatgataaagcccttgatacgtccgggatcaattcgacctcccgtagtgttttagaagaatttttataaggggttactttatcttaaacaagccaaattgtcgctgattagatatatacccgtcatctttcaaattgcctctttattggctgcactcactcaccccgatcacatagttatctatgctcctggggattcgctcctttgccgtcgcgatgcatcttgaaatccattgggtatggcagcgaaaatatgtcagcgtcatacagagaacgaggaatgggttggttatggcaacacaaaccactaaaaaagaaaaagccctgctgtttaagcagggcttgatatggcgcatccagaaggattcgaacctccgaccgctcggttcgtagccgagtactctatccagctgagctatggatgcatgttcagttttttactctggtaaaaggcagtagttgcttcgattacctgaatggtacctcggatggtttcatctcaaggttaaattggcgcatccagaaggattcgaacctccgaccgctcggttcgtagccgagtactctatccagctgagctatggatgcgtgttcagtttttcactctggtaaaaggcagtagttgcttcgattacctaaatggcacctcagatgacttcatctcaaggttaaatatggcgcatccagaaggattcgaacctccgaccgctcggttcgtagccgagtactctatccagctgagctatggatgcgtggtttaaatggcggtgagagagggattcgaaccctcgatgcagcttttgaccgcatactcccttagcaggggagcgccttcagcctctcggccatctcaccgtacgctttctttcgaatcgcgactcagaacttttgtttaagctcctcgtcactgcgtggcgcacatattactttcccagacttataagtcaaacaatttttctaaacctgtgtttgtttgaacacttcacacacaagatgtgtagtttgacaccaaaaagtgtactttgtcagcagcaaactattacaccttcaattaaagaaagtgcatgcaaatcattattcgccacaataacatgataggaatactctgttcttacgatagaaaaacaaaaaagagaggaaaatagacaagaagttaagaaactagcaagacaaaaaataccaacagaggtgagatccctcaaaaatggcgcccggttctgacagagataggacgccaacttagagtcaataagttgttggctgagatttttcggcctgaatccgctgataaatttcttcacggtgaacagaaacttctttaggagcatttacaccaatacgaacttggttacctttaacccctagtactgtaactgttacctcatcgcctatcatgagcgtttcaccaactcgacgagtcagaataagcattctttgctccttgaaaatttaaaagagtcgggtctttcggtttccccgctattatccatcaaacaccgtgaaaacgtaaaacaatggtatatgcttaaagtataagcaattttaagcgcatttcctacctatatagtttagccaaaataaataaatatgcgctcaaccttttaacaatttcacaacaagatttcaaggcaccataaaaacaacgctatggtgccctctaaactcaggtaataccgcttatagccgcgatgctacccactcttccacgctatccaaagcagaaggcaacgcttcaatatcagaaccacctgcttgggccatatcagagcgaccaccgcctttaccaccgatttgctgagctacagaagaaattaactcacctgctcttattttagcagtcagatcctttgtgacaccaacaattaagctgactttatcatcacttatagtggaaagcacaataattgctgaacctagttgatttttaagatcatcaaccatcgttctcaacatcttaggctctgtattgcttaactgactgaccagcaacttcacacccttcacttctttcgctttacttgctaaagaagagctctcttgtgcagcctgttgatctttaagctgttgaagctctttttccaacgctttggctctatccagcgtcatccgtactttttcactcaagctatggatatcacttttcactaattgagcaatatcttgaagtaaatcaacctgttgatgtacagattccaccgcttttttacctgtaattgcttcgatcctacggatacccgcagccgttccagattcagcaataatacgaaacaagccaatatcaccagtacgatttgcatgagttcctccacataattcagtggaaaaatcccccattgatagtacacgaacttgctcttcgtatttttcaccaaacagtgccatcgcacctttgacttttgctgtctccagatccatcaattcagtaacaacaggtgaattttgacgaacttcggcattaaccaaatcctcaaccagacggatctgttctggtttcatcgcttcaaagtgagaaaaatcaaagcgaaggtatttatcgttaaccagagagcctttctgtgatacgtgctcacccaaaatttgacgtaacgcagcatgtaacagatgggttgctgagtgattcaaacgaattgcatcacgacgttcaatatcaataaccgcattgatgttatggtttacacttaaggtacctttctcaagcttaccaatatgaccaatagcctgaccatatttttgtgtatcaataacacaaaaagcacaattggtattactcagaatacccgagtcaccaacttgtccaccagattcagcataaaaagcggtcttatccagtataacaatcgcttcttcgcccgcctgaatttgattgactgattcaccatcacggaagatagcagtcactgttgcctgctgttcgttatgatcgtaaccagagaaatcgctgcgttcatcaactttgatcaattcattataatcggtaccgaaaccacttgattcacgggctcgacgacgctgattttccattgccactgcaaatcccgcttcatcaacgctaatattacgctcacggcaaacatcagcggttaaatccacagggaaaccataggtatcatacaaacggaaagccgtttcgccatccagaatatcaccggacagttttgcgagttcatcgtctaataattgaagaccacgttccagcgtacgagcaaactgctcttcttctgttttcaagatctgctcaacaactgcttgctggcgtttaagctcttctcccgccgcgcccatcacttctagcaatggcgcaaccagtttatagaagaaggtatctttagcccccaacatgttaccgtgacggatagctcggcggataatacgacgcagaacataaccacggttttcattagaaggaacaacaccatcacaaatcaaaaatgcacatgaacgaatgtgatcagcaataacccgcagagatttattactcagatcatctgtagcaccagtgacattagcaacaactgtaatcaaatcacggaacagatcaatctcataattagaattgacgtgctgcaatacagcagtgatacgctccagccccatccccgtatctacggatggttttggcaacggctccatcgtgccatcggcatgacgattgaactgcataaagacgatattccagatttcaatatatctgtcaccatcttcctccgggcttcctggcggcccaccccagatatgctcaccatgatcataaaaaatttcagtgcaagggccacaaggaccggtatcacccatttgccagaagttatccgatgcataaggtgcacctttgttatcaccaatgcggataattctttctgctggtattccgacgtcgttcttccaaatatcataggcttcatcatctgtctgatagacagtcacccataatttttctttaggcaaattaaaccaatctttgccagtcagaagttcccaagcataactaatagcatcatgtttgaaatagtcaccaaaactaaaattacctagcatctcaaagaaagtatgatgacgtgcggtgtaacctacattttctaaatcattatgtttaccaccagcacgaacacagcgctgagcagttgttgctcgggagtaagatcttttgtcctgtccaagaaagacatccttaaactggttcatccctgcgttggtaaacagcagtgttgggtcattatttggcaccaaagaactacttggtacgacttgatgccctttagtatgaaaaaagtcgagaaacgcttgacggatctcagcagtgcttttgctcataattgtcccaaaatcaagctggaaaaaacagatttatgaattggttaggtgggatattccatcacctattttcaactcacgaataaacaaagtggggataagataaaagctcttctattagaagtatacccgtcatctttccaagttgcctctttgttggccttgccgtcgcgaagcatcttgaaatccatagggtataaaatcccaaatacatccattcgctggcagcattgtaaatcgtctggatattttctgaaagcatgatcgcataatatggataatactcgctttctgagagaggaaaccgcgtcattattaacgcggtattagtttgatgacaaaacttttacagctttgaatacaagaatagagattaccgatattattagattagaattcttcgttattcatctcttcattttcattgtcttcataatcagaagcagcactattgaattcgccggcattgtgcaacagcatttcacgtaattttttatccagctcagtagcaacttcaggatgctctttcagatagatggtagcattcgctttgccttgaccaattttatcgccattatagctgtaccatgcgcctgctttttccaccagtttatgcttcacacctaaatcgattaattcaccataagtgttaatgccttcaccatacataatctggaattctgcttgcttaaatggcgctgccactttgttttttaccaccttaacacgggtctcgctaccaacgacctcttcaccatttttcacagaaccaatgcggcgaatatccagacgaacagaagcatagaatttcagcgcgttaccaccggtggtagtttcagggttaccaaacatgacaccaattttcatacgaatctggttgataaagatcaacaacgtattagaacttttcaagttaccggccagtttacgcattgcctgactcatcattcgagcggccagccccatatgagaatcaccaatttctccttctatttcggcttttggcgttaaagcggcaacggagtctacgataatgacatcaacagcgccggagcgagtcaacgcatcacagatctcaagagcctgttcccccgtatcgggttgagaacacaacaagttatcaatatcaacacccaacttcttagcatagatgggatcaagagcgtgttcagcatcaataaacgcacaggttttaccttcacgttgtgccgcagcaataacctgtaatgtcagcgttgtcttacccgaagattccgggccatagatttcaacaatacgccccatcggcagaccaccagcacctaatgcaatatccagtgataatgaacccgtggagatagtttcaacgtccattgaacggtcttcgcccaaacgcatgatggaacctttaccaaactgtttttcaatttggccgagtgccgctgctagtgctttttgtttattttcatcaatagccatttttactccctcgtaagcaatgaaagggctctctcactgccgatgaataatttttaatactgaaatgttgcctacaattatactgtataatcatacagcatcaagttaattttttatacccgttatctttcaagttgcctctttgaagcatcttgaaatccaataaggtatataatctctgataacagtgttttcagagaataaatgacagcttgaaggcgtacttcatttcgatcaccgttaaaacaacaacggcgggacacaacttctaccccatttaccgttagataggcaaacccaaaccacactgtgccaacaggtttttcttcgctgccaccatcaggcccggcaatgccactaaccgaaaccgccagatctgcctgtgcggctttcagtgctcctgtcgccatttctctcacaacctgttcactgacagccccatattgctgtaaaacggcctctgacacaccgagcatctgatgcttagctttattactgtatgtcacaaagcttcggtcaaaataagcagagctaccggcaatatctgaaattgttttcgccaaccagccaccggtgcaagattcggcacaggtcaccgacagtgtttgctgtctcagtttctctcctagctcaatactaagctgagtcagaattttttcactcataacactctctttatccgataaaagatcaatttctttgaaaccggttccaaatccacaaactcgtgattgtcaacgccaacagagtaccaaagcctatccctgttgtaacaaccgggacgcctattttaataaccaatgagtagaggccaagcatcaataacatggcgatattctcacccaaattctgtactgcgattgcataaccgaccccaatcgtttgcctgccgctttcctgcaataatgcattcagcgggacaataaacaaaccgccaaaaataccgagaatgattaataagacgtaggaagcccaaatactgtgctggacagcgaaaatgaccaccatcacgccgattaaaacaccggcaggcatacaacggtgaactgttttaagggtgataaaacgggcagcagcacccgcaccgataataatgccgacagcaaccatcacattaagtattgtcggcgtgctattgtcagaaattcccagaacaacaggtacccataagaccaataggaatctcagtgttatacccgctccccagaacaaactcgtaccaattaaagaaaatcgagcgcctttgttatgccaaagaatgcaacaagctgaagcaaagtctgtcagcatctttttcagattccagcccttatcccgacgcaccgccgataatcgggggataaagaaattagcgacaacagcaataccgtacatcaacgcacaaaccagcagtgcgattgccaagttccaatcagacaaaaaaccaccaacgacagagcccgtaagaatggcaattattgttgaagcctccatcaaaccattcgcctttactaaacgatcaccatcggtcagttcaaccaaaatgccatatttagccggtgaatatgatgctgctcccacgcccaccaaggcataacccagaaatggatcatatcccaggcaaatagtaaacgcgcccaacaacttgaagctattagcaaacaacatcacacgatctttcgggaaacgatcggcaatttgccccacaaaaggtgccaataggatatatgccaagacaaacactatctgtaatattggctggctccagtcaggataaaactgggctttcaactgtgccaagatcgcaaacaacagtgcattatcggcaaaagccgaaaaaaactgcgacaccaatacggctttcatgccacgggtcaatagcggttgaacaacggaggatgcattcacaatatattgttcctattcagcttccgctattttacacaaagtaacaaaatcggctttaccaccgtcaagttctccctgtttagcaaaacgtttcccccgaccgagaatagtacagaatccctgttcatcaattgaaacaatgtcaccagtatcgagccaatcaaactgaatattcccatgttcatcttttaccgctggtggttccaaatgatttggatcttccattctcagatatcctttcatcatattcgggccacgtagctgcaaacgtcccccctgcttaattcctgctatcggaatcaaacggaattccattgccggcaaaatccgcccaaccgtaccgaccttagccatcatcggcacattcaatgcaatgacaggcgcacattctgtcatgccatatccttctaaaatgcgaataccgaatttgtcttgccaaatctgtttagtattttcagcgagcttttcaataccggctataacacaacgaagacgtgcaaaatcatacggatgagcagaataggcataattctccaggaaactggatgtacccaataatacggtacagttacattcatataccagttctggtactacccgataatgcaatggatttgggtagaggaatattcggctaccagacaacaatggagtgaataagccaacagtcaacccaaatgcatgaaatagcggtagagaagacataaaacggtcaagtggattgaaatcagtaatggtttttatctgttccacattggctaacaaactagcgtgactgtgaacgacaccttttgatacagcatctgaaccggacgtaaatagcaccaaagcatcatcatcgggtttttgtgccaccatcgcttgcttcggaaaaaagaggtgccacaagatccataatttatccagcaaagtcactgtactttccaaatcctcaagataaacccagttaacctcggtaacctgctcggataaatgtgttaatcgctcctttttcagaaattgccgggaagtcacgatagttttaatactggcaaccgctagcgcattcttcaatccatgactgtcggttgtatagtttagtaaagccggtattcttcctctcaaagatgccccgaatatcgcagctaccataatagtggcattaggtaaaagaaaaccaatccgttccccctggcaggtaaaacgctgcaaaatacgactggccgccagtacttttttaagcagactgttataactgtcttctttaaaagaaacatcttcaatacagggcttaaaacgaccaaattgttttcgtgcaaccagtaaagattcaaatattgtttcttgcggtcgggtcgccattcgggcattcatcattatttcatgcaaacgctcaccggctaaacgacgtcgttgctccgaactagacgcattcggcatcagcaattgtgtcgcaggcaggattttcattgtcaccttcggaaaaaggtgaagtttgaaaataccctttaatcggctgaatagggttctttctaacccttcaaaacgaacaggaaccacaacggcttcagatatcgccgcaataaaagctgccccatcatagattttcatcaaagaaccagtcacagtaattcttccctcaggaaaaacaactattggccgccctttttctatttccttaaccagtatcctgacagccattggatttattgggtctaagggaactatttcaacatagcgacttaccagtttcataaagccacgatttgcaatgttggaatagacagcaaatactggcttaaccggcaaaaaaagtgttagcaaaacaccatcaagaaaagagacatgattaggcgtgataaggcattttgggtggttaaattgtttaatatctccttctactgttaaacgaaacatcaaacgaaaaacaagccttagaaatttaaacaacatattcgtatctcaacccatttgaaaaaataaatagaagatactatttattattcgacactgtaatattcttatttctctataaaaaataccaaaatagtgtcaggaaactattccagagaacataatctctttcacataagttgtaattttttccggtgaaaggtgcgcattaataatatggttcgcacattcacaatagagattttctctggcggcaagcacttcttccatttcttcaacaatagattttcccgtcaaactaggacgttgggtactttctggttgctgcattaatcgctcagccaaaatgctcgctgaagcttgaagataaatcaccgtgccattttgtcgcatatattggcgattttcagcggaaagaatgatacctcctccagtagaaataacgcgattaatttgagtaacttgttgtaaagcttggctttctaattgccgaaattgttgccatccttgctggttaacaatatccgcaatggtcatattactggtttgttggatatggtgatcagtgtcaataaatgtgtacgataattcattggctaataattttccaaccgtcgtttttcctgccccacgtgcacctacaataaacaatatttggttcactgcctgatatccttgataaatttcatcgttaaaaatatattaacgcctatagtaaccagaaatttacatcaacgtaaaattaaaagttaatatatacggtaaaaaccaccccaaaagcatgaccttaccgaaacttcaatataatcaggctcgcttctggggtaacaatatacccgttatctttcaagttgcctctttgttggccgcgctcactcaccccggtcacatagttatctatgctcccggggattcgctcccttgccgtcgcgatgcatcttgaaatccatagggtatagcacattacttacggactaaatcctctccataaccaatccatttatacgtagtcaacgcatctaatcccattggaccacgagaatgcagcttttgcgtgctaacagcaacttccgctcccaagccaaactggccaccatcagtaaagcgagtgctagcattcacataaaccgcagcagaatcaacctgacgaacaaaatagtcagcattgtgcaaagattgagtcaaaatagcatcagaatgggacgtaccataggtacgaatatgatcaattgcctgctccatatcactgacaatttccacattcatatccagagataaccactcatcacggtaatctgcttctgtaacatccacgaccttagcagctccatctttcaaaaacaccattgctgatttactcgcatgcagagtaacgccttgctcttccatgtacttgctcagtgcaggcagaaaatcagccgcaatcttctgatgtaccagcaatgtttccaaagcattacaggcacttgggcgttgcactttagcgttagtgatgacagttaatgccttatcaaaatcagcactttcatcgacaaaggtatgacagacgccaattccgccggtaatcactggaatggtcgattgctcacggcacaacttatgcaaccctgcaccaccacgtggaatcaacatatccacatagcgatccaatttcagtagctgaataactaactcacggtccggtttatctatcgcctgcacggcggcggccggtaatccactctgttcaagtgcctgctgaatgactttcactgtcgcttgattagtgttgtgagtctctttacccccacgcaaaataaccgcattaccggttttcaaacacagagatgcaacatcgatggtgacattagggcgtgcttcataaatcaccccgaccacacccagcggtacacggcgacgctccaacctcaagccactgtcaagcaaactgccatcaatgacttcccctaccgggtcagataaaccgcatacctgacgaacatcgtgagctatcgcggtcaaacgttccggcgtcaataatagacgatccaacaatgcttcgctcatgccctgttcacgggcctgaatcatatcaagctgattagcttcaagaatgattgcactttcctgctccagtaaatctgcaatgcgaattaatgcctgatttttctgttttgtacttagctgtgccagttgccatgcagcttccctggcagcctttcccatttgttctaacattatgaatccttaactcacgatcatgtcatcacgatgaaccgcaacagcaccatattcataaccgaggatttggcttatctgttgtgaatggtggcctgcaattaaacgtagagcatcactgttataacggcaaacaccatgcgccaaatctttaccagacagactacgaatacagataacctctccacgggagaaatcacctttaatatttttaatccctttcggtaataaagagctgcctttttcgcagattgctgtttcagcgccatgatctacaataatttcacccgccggaggtgcgccaaaaatccaacgcttgcgattttccatcgggctttccaacccatgaaaacgagtacctaccggattaccttcaatgacatcagagatgacatcgggtttattacccgcggcaataatgacatcaatccccgcgcgaccagcaatccccgccgcctgaagtttagttgccatgcctcccgtccctaaacccgaaatgctatcaccggcaaccatacgtaattcatcgctgatgtcataaacttccgggataagttttgcgtctggattgttacgcggatcagcggtatacagcccttcaatatccgtcagcaatagcaatttatcggcgccccccagaattgccgctagtgcagataaattatcattatcacccacttttatttccgccgtcgcaaccgcatcattctcattaatgacaggcacaatgcgattatcaagcaaagcctgtaaagtatctctggcatttaaaaaacgttcgcgatcttctaaatccgcccgggtcaataacatttgcccaacatggataccataaatagaaaaaaactgctcccataactgaatcaaccgactttggccgaccgccgccagcaattgcttggatgcaattgttgcaggtagatccggatagcccaaatgttccctccctgccgcaatagcaccggaagtcacaataataatgcgatgacctttttcatgttgctgagcacattgccttaccagttctacaatatgagctcgattcaggcgacgagagccgcctgtcagtacactcgtccccagtttcacaaccaatgtttggctgctattcatcatatttttgccattaaatttaaattaaaaaaacagtgctcagttttaacaggagagaagcgttatgccaacaggcatcataatgctaaattgaaaaatataggcgcttagaacaaatcaacattgttcacttcacccgaaagcgcatgaaatctttataaaataaagcagttaataatcaacaagtaacgtaaatttcatcaacagactttatttctcaaccattgactaatctcccgtaacgccttattgaaactgttataaacaggtgttgtcggaatagccagtaattgactatccattgatgacattgctatcagcttagattcctctttcgggctgaaaatatcattctgccaataacccgctaacataggaacggaacaacgccgacctaacaaaccttgttttttaagggagtaacaaccgagttcgagacgaaacgccttttcatccacattataaatacccagtctgctagcaaacatatcaagatacatcgaaggtgaattttgttgacgttcaacactgctgagccactcatgaacgatagcgccaagagtcgcaacgcccttaatacgtttagattccaaataggccaaccggacggcaatattggcaccaaagcgaaaaccaaatagaccaatcctggtgtggtcaatccagggaatttcatccagttgatggatgatttgttgatggagaatacaggtatcctgtgtcatcctcagacgtgaagagtaaccaatcgagggcatatccacagttaacatcgcaaatccaagtggtgccagataatcacggaacagccgataataatcgctttgcaaattatccaaactgccacaaaccaaaatagttggagaaggtctttgcagttgctgaggcagatgaaggaaaccggtcacacaacccccttccttgagtttgaactctattttcctcaactgatagccagaacaacgagccgcattttcataagctttattggctaaaatgacagcctgctgagacaactcatcccccttaagatggggataaccagcgatgctatacaaattagccgctttcaaccagaaattgctcgcttctgggatctgctctgcctgcaacgctctctgttgccacaacatcgcctgatgtgaccactcaaaaacccagttacctttacgatacccaatcacagtatccagtaaattatcatcactgcgctgtgcgtttgtcatggcaatccggcacaacacttcttctatttcaaacggatcaatttctcgccaaatccacatcagccggttaatcatacgataccagctaccatgactattaccatctaacgtactgtaattacccgcaattaaccgaggatcgcggtgctttaccaacgtggaagtttcctgatgtttttgtcttggcttaaaaagtgattctgaaaggttccgatttgccataactaatgctgattttatctaccttcacaaatgggtggaacgaatactacacccatatcccaaggttgctcgatccaagtatcttgaggaatatcaacaatataatcatcaaccaacggttggcctgccggctttgcaaaaatagtcacaaaatgggctttgggatatatttcacggatggcctgagcagtgcctccagtatcaaccagatcatccacaacgatgaaaccttcaccatcgccttctgcttttttcagaactttcagctcacgttgattattatggtcatagctggaaatacagactgtatctacatgacgaatacccaattcacgcgccaaaagcgccccagggacaagaccaccgcgactcacggcaatgatgcctttccactgttcgacaggaagtaaacgttgtgccaatttacgggcatgtatttgcaacatatcccaagttacgacatatttttcgctcataagaattgatcccgacaacttaaaaatactttagaaaagcatctcgcaaaaaaagttgcgcgaattatagtgacttaggtctgtaaaaactagcggaaacagggaatcaatgaatcgtattattcttaacaaaagtaaagtggtattctgagcccaataacatcatggcgttaagcgctcatcatatagaaacttaattgagatgcagtcataggagattcgtcgtgtcagaactatcacaattatcccctcaacctctatgggacatctttgccaaaatctgctctattcctcacccttcttaccatgaagaagcgctggcaacccacattgttcaatgggcgcaagaaaaagagttgcacgttgaacgtgatcaagtcggcaatattctgatcagaaagccagccagtaaagggttggaaaatcgtaaagcggttgttttgcaagcacatcttgatatggtgccgcaaaaaaacaacgatacagtgcacgatttcactaaagatccgatcagcccttatgttgatggtgaatgggttactgcccaaggtacaacactgggggccgataatggtattggcctggcatcagcattggcggtactggctgatgacaatgtaaaacatggcccgctagaagttttattgaccatgacggaagaagccggaatggatggcgcttttggcctgcaaccgggctggcttcaagctgatatcttgatcaataccgattcagaagaagaaggggaaatctacatgggttgtgctggaggtatcgattttaccaccactttagcattgacccgtgaagctgtgccggctcactataaaacactaaaactggtcattaaaggtctaaaaggcgggcattccggttgtgatattcatttaggactgggtaatgccaacaaactattggctcgcttccttgtcgcccatactcaggaattggggctaaaactgctcgacttccaaggcggtacgctgcgtaatgccattcctcgtgaaggccatgttattgttgctattcctgccgataaagcagcacagcttacccaactgaaagataactacttggatatactgaaaaatgagtatgccatcgttgagaaaaacctgactgtattactggaagaggttgaaaccgatattcaggcattaactgatgattgccaaaaccgttttatctcactgctaaacagtacccccaatggtgttatccgtatgagtgatgtcatcaaaggtgtagtagaaacctcgctaaacgtgggcgttgttgcaatggaacaagataaagtgaatatcatttgcttaatccgttcgcttatcgacagcggcaagtcctatatcatcggtatgctctcttcgctcgctaaactgtcaaatgccgagatttccgctaaaggtgattaccccggctggcagccagatgcaagttctcctgtaatgcacttagtaagtgaaacttatcaacagttattcgataagacacctaatattatggtaatccatgcagggctggaatgtggcctattcaagaaaccttatcctgatatggatatggtatctatcgggccaaccattacgggcgctcactctcctgacgaacaagtgcacatcaaaagtgtcgggcaatattggcaactgctgactgcaattttgaaagccattcctgaaaaggcttaatcagttctcccctgccctatgtgatggcaggggaattaccattcaagcaagagttgccgctcaatttctgggtcctgcaacgtcacgtgcaaaccaaccaaacgaacgccacgcccttcccggcgagatgtccatgttttctgggccaattgcagtaaatcctgcttatccaataatggatgaacatgctcctgagtggtgagttgaaaatcatcaaatttcagtttaatcccctgacgggcaatccgcagatcaggtttaacgttactcaaccgtttttctaattccagatataaactttctatcagttcagtgcactgttcccattgatgaatatctctcgcaagtgtccgctccacaccaattgattttcgcaaacgatctggattcaccaaccgttcatcaataccgtgacaacgatcccaaagtacctgaccaaatttccccaactgtttcaccaaaacaatgacgtcatatttttgtacatcagaacaggtttccagccccatattagccagccgttgcaccatgactttgccaacccccggaatttttcgcaaaggtaaaaccttaataaaatcagccactcgatcaggaggaatgacatactgcccattcggtttattaatatcagaagcgatttttgccaaaaatttcaccggtgcaataccggctgatgccgtcaattgtaattcatcaaaaatggattgacggatctcctgtgcgataagcgtggcagatccataacaatgatggctatcagtaacattcaaataagcttcatccaatgacagaggctctatccactcagtataacgagacaatatctgatggatatgccgggaaacctccctatacagtgccatacgccccggaagaactttaagctgagggcagagtttcagcgccattgcagtagacattgcactacgtactccaaaacgacgggcaggataattagcggtactaataacacctcgcctgtctgcattgccgcccacagcaatgggaatatgacgaagtgacggatcatcacgcatttcaatcgctgcgtagaaacagtccatatcaatatgaataatctttcgcattctgctttagcctatcaacaacaactgtataaacatacataaaaatagactcaagagcaatctagtaacaatatcggctagtaacaccatcagagcgacggttaaaagacacttttagctcaaatttgaaaatatcttgaccaataaaataattaattaataccgttattaacttttccctgcccgattccttgcgttaagtgacctatcctgtaagtgcaacttttctatttaacgacattccaaggatactaataacaatgaaaaatagcgggaaaccacaaaaaacctcagctacagcgactacacagccaattaatcgcactcttcattatgctttatcaagcataattatgctgagtacgggcctgccaggttatctggctgcacaggaaaatagagagcaaaaatcaaaagaaaaaccggaaaaatcagagaaagtcattacactttctacactttctgttattggtggattgaataacagcgtcagtgccggaagctcggtattgaaaaaagaggatattgaacgtacccaggcagataatattgccgaactgcttgatcaacttcccggcgtttccatgtcaggatcgcctcgtccaggcggccaaactctgaatatctggggaatgggtgataccgaagacgttaaagtcaccttagatgatgcaccgaaaggcttcgagaaatatctccaaggctctatctttattgaacccgaattaatcaagcgagtcgatgtcgataaaggcccacataatctacttgatggtaatggcggatttggcggaacggttaaagttgtgaccaaagatgccagtgatttattacggcccggagaagattttggcggattgctgaaatacagttatcacaccaatgatcgccaaaatatttatagcagcgcagtctatggccgaacaatagagggctttgctgacggtctgctatatatgagcaaacgagatggcggcaatattaaacgaccggatggcacccgttttgcgttctctaaaagtgatcaggcatcctatttactgaaaacgaatttttacctgaacgatgctaatacattgacactttccgctatccgctctgattctgatggctggcagccgtgggcagcaaaacgtgatgagatagctgttccgtcagaagccgacattgaaaaatatggttggaatgaagcctggcgccggaagttagtttatcgtgatcaaacagaccaaaattacacagctaaatggaatattgcaccagaagacaatccgttacttaacctgacagcaacctatgcctattcgaaaacagaacagcatgataaacgctctgaaaaagcccacagcggttttcttggttcattaggaaatgaaagctggatcgactatgtagataacttagcagatataaataacaaaagtgcttttataaccggaccaatagagcacacattattagttggagttcgttggcataaaaatcaacggaatacccttatccatgataaaagtaaagacaaaaaacctgaatataattatggctattttcagccaacctatatgccttcaggcgagcaaaaaacgaatagtttctatttgcaggatgcaatggttatcggcgatgttactttgacacccggtgttcgctatgaccatatcaccaatattggcaaacccaatatcgcggcaatctacaataataattcaccaaatatagggcacgattaccgcagtgttacttatactggctggtctcctcattttggtatcatgtggaaagcaacacaaaacctgtcactattttcagatatcagccggacatggcgcgctccgttggtggatgaacagtatgaaatgcaatatgcccgggcaagtgttactgccaccagccgtaacttggatgtagaaagaataacgggtttacgcttcggtgcgattctgaatttcaataacctactggcagaccaagataatttgcaaatccgtacaactttattccgtaatagaggcaaggatgaaatatttacccgtcgcggaatagtatgtaaatcaccggattgcggaaaacctttatccaactaccgtaatttaccgggatataccattcaaggattggaaatcgagactttctacgacagcaattccttgttcggcaaactttcttattcgactatccgtggtcagagagatgcttcacctcgcgatccttggggtaataaaacctggattgcggaaattccacccacctccgcccgcgccatgttaggggtaaaaatccctcaatggcagatggcaataggctggaccggagattttatccgtaaacaggacagatcgccgaaagatggagatcccatggcaacactctggtcaatacccaaaagcaaaggttatgcactgcatggcgtattcgccagttggcaacccaatttctggcaaggtcttgaagcacgtgtcacggtaaataacttgtttaatcgtgattatcgcccatacctcggtgaatcggtttccggggttggacgtaacattaaattcagtatttcccagaagttttgatttctcacctgatagttccctctatttgagggaactcagactgctgaccattcaactctccaagtttctttctcaccctgacgttgaaatatcgcaactgattgctcttctgaaaaatcacacttatttagctgaattaattattatttttatttaataatcataattaccttgattgataaattagtcatttctttattaaagaaggtatattgtcgtcagaatggacacctgttaaattaagactcttgttattttatcgtatggttcatcttatttagtttttttgcgtcacatgatttaattatccttttaacaaacttatttattttggccattcgagtaaagcaatttgttcctagtgttttagcgatgcaactgggtaaaaaaatactgggacatggatttgataaatatttgaacgccccgagcataggacggattggaatggcattttatgaagcagaaaatgagccacctcgtgtagctgattattttgaaagtgtgtttaaaaacatcaatgatttgcggcaacgctgttcaccttatccgctgtcattctggagttaatatgttgtataactattggggggaatttctaggactggcggtgattcattttctggcagtagtagcaccggggccagatttcgcggttaccatacgacaaagtgtgaggtttggtcgctgggctgggatgtgtacggcagtgggtatcggagcgggaatatcagtacatgtcatctatacactagtgggggttagtgcattaatgcataccactccgtggttaatggaattagcaaaacttgttggcggaacttacatcatatggctcggtatcaaatttatcaggagtaagcctaccgatttggctgtcttagagaatgagggaattgttcaagcttcacagagtagatggaaagcatttctgatggggtttatgacaaacgcccttaatcctaaggcgacgttgttctttttggccgttttcacgactgtggtgagtagcaatacacctatcctgatacaaatgttttatggggtttggatgtgtgtggtcaatgcggtatggtttgtattggtcagtgttattttttctaatacattgattcgtaataaatttatacggaaagggtattggttcgagcgggtgatgggactggtgctgatcggatttgctgttcggttattatttatgtctgtttgaatttctccaaaatagggattggcaacgaacgtctcaatactgatatacaacttgttcggtaatagacgaaatgattactgtcatcagcatgaaaacgtataaaaagatatataccctatggatttcaagatgcatcgcgacggcaaaggagtgaatccccaggagcatagcaagctatgtaactggggtgagcgagtgcagccaacaaagaagcaacttgaaagataacgggtatatttagttagcccagtcattttgctaccttattaatcaatttaaaacccatccttcctaatgttttctcgttcaatgtcggtatgatgttgaattttctacccgctttgaaaaaacctaatcacagccttttacctttaatgattaaagttttatctgttttttcatgacacacttgcactttttctcgattttaaaaacccttccggttgcagcaaaatgccataagggaattcacttaaagccaacagcttgacagacgatgatcatatgaaaataataatcattttcatttataaaaattgttggaaatcataataccaacaccaaagacatgcctaaaattaatagttctgcgcaacaattttactttgaacatcatgactggttatataactggctacgccgtaaagtcccttgcccttgccatgcggaggatctcacgcaggatactttcctgaacgttctatcaaattcaaatttgtcagacatccgccagccacggtcttttctagcaaccgtggcccgttgcctggttgccaactattaccgtcgaaaaaagaacgaggagagctatttggaatatataaactcgacaccagaaatgaccatgccctctgctgaaagcagaatcgctacatttgaacagcttgaaaaacttgagatcactcttgataaattgccagttcaagtaaaaagcgcttttttactggcacagctacaaggactacgttatagcgaaatagctgatcaacttcaggtttcttccagctcagtaaaacagtatttgcaacgagcacataacaaatgtaaaaaaattcaaattctcacttaaaattcaaaaaaccgtgttacattcaaaattgatttcatgaagaaatcattaataaagttgattattttaacttagttataattggatattatggagaaaacgatgcgacacggaattaccgctgcaatcctactttgttgctctgccagcactttcgcaacaccaccacaaattatcgctcatcgtgccggtacaggtgatgcacctgaaaatactgagtacgcaatttctaactccttagagaataaagcagatgctatttggatcactgtccagctttcaaaggatggtattcccgtactctatcgtccaacagacctaaatagcttgaccaataaaagtggactcgtttctgcttataaagcaagtcagttggctaaatttgatgctggttacaaatttggctctgatggtcatcatccattccgtaataaagggttaggtattccaacattagaacaagtcttaaaaaaatacccagatacttttttctatattgatctgaaatcaccggatgcggatccagcacaacaagccaaagcactagaaaaagtactgaccaaacaaaaatcgcttgcccgtacccgtttctattccactaacgaaacttaccttaacgcattacccgcaacaattcagcgttttgaaagccgggataaaacccgcaccatgctggcaaatatcacaatggctcatcaatgtgatatccctgcaaataccgacaccactcgctggtatggtttggaaatgcgccgtaacgtagaagttgttgagaaatatactcttggtgaggcacgttccaaatcagtattatcatgggataaggaagcgatggcgtgtttccgtgctaatggtggcgctaacatcattctctttggcattaaaactgaggaagatttcaaacaagctaaagagcttggtgccgatggtgtactggtggattctcccaagctgttcagtacctttaaaacaaaataagaatttgaggttcccagaaagaaactcccccagtaactatttttaaggaacgctttaccccatacagacaaaatcttatatagacaaaacaaggcagaacccgcagttttttgcgggtttttccattggtaaataaggcgcattttccaaactcaagatgagatttttaataatcaactcctaatttctttaagcgtgagatcaatgtcgttgggttcattcccaacaattttgctgcgccatcatcaccaaaaattttacctttgcattgtttaacggcaagagagaaatttttaatttccaagtccttcagttgctgcatggtcagcacaacttcaatgtgttgaagtttattgtgaatattctgatgcgtcgtttcattttgctgttgatcttgttctagcaaatatttaaacgaaaccgtgccttgtttcgctataatgagtgcgcgttcaatgacattttgtaattcacgaatattaccaggccaatcatattgctgtaattctaaaatatgcctttgtgaaaatgggagataattaattttacgcttgtcacaaatcaacttagtaaaatgcgtaactaaaagtggaatatcttctttacggtcacgtaaagccggtgaataaatcgggaatacatttaaacggaaatagaggtcttcacgaaaacgtttgtgtttaacttcttcttttaaattgcggttggtggcggcaataatccgcacatccacatgtcgcgttttttcttcgccgactcgctcaaaggttccttcctgcaatacacgcagcaatttactttgtagctcgataggaatttcaccaatttcatctaaaaacagtgtgccttggtctgccaattcaaaacgtccggcacggtcacgcacagccccggtaaatgcacctttaacatgtccgaaaaattcactttcaaacagttccgaaggaatggcggcacaattgactcgaataagtggttgctgtttacggtgactggattggtgaatagcacgagcaatcagctccttgcctgtacctgattcaccataaatcatcacattggcatcggttggagcgaccaccttgattttctcaataatctgtaaaatggatgcacttctgccaataatttcatcatattgattttcatgtaaaatttcttcttgcagatattcattttgctgttccagtcgactttttaaatcttgtagttcttcaagggcatgggtcagttgtttttcggtattcagccgatcggtaatatcacggaacaccactaccgcgccaataatttcactgtcacgaatcactggggtactggtaaattccaccggaaagcaactaccgtcacgacgccaaaaaatttcctgcaccccttcgtgcacaataccgtcatgtaccgccgcgtaaatcgggcactcttcttcaggatagggttcgccattttcatgggtatggtgatgaacgttatggatattgtcactcaatacatcttcaggttgcagccccaacattttagccccgacagggttaataaaggtacacaagccttgtttgttaatactgtaaataccgtcaccgactgaactcagtaataaatgcttgcctgtgtcagagtcaataaacagctcttgtaaggcttgcgattcttttaaacctatacgaatggctttatcggcatttttattgagttggcgcaatgctaaatctttgacatccaccagcgaccatatcagcaaggttttatttttataagacaatgaaacagcagtaatatccaattggattttttcaccgtttctatcaaagatatacaactcattgttccaggcccgaccttttaccaaagcttcttcggtaaatgccataagatatggcagttgtctgaaatgaccaaaaatggaagtcaccgttttttgaataatttcatgacgttcatattgtaataattgggtggcgctaatattcacatcaataaactggttttgatgtggatctagcacaattaatgcctgtgacgtgtgttcaaataccagcgggcgaatcgagtcttcgtaaactacccagtccgagataaagtcagttactatacctgtcatctttcaagttgcctcttaaaatccatagggtatatgaaatttcataatttaagcgattaaatttcataatactacgaaaaatcctaattccctagtcgttcaatttatctccatggaaactatttttataaaaattaaatgatatttttcaatgtgataaaaattaacttccactccaaaatacaacttggcacagttctcgcaataatttctcgcaatagtacagacagactacatgttggttcattcccaaataacattgaacgaggagttggtcatgccaaagattgatatcgagcaatataaagacggcgattttcttgttgattacgaagaaaaagtgtttgaggacgtcaaagccctgccaggtgaaaaagcattggtgactttccataccgttgcatttgaaggatcagccggcttggtcaatgtgttacaggcaaaacgtctgttgcgcaaaggctttgaaaccaaaattttgctttacggcccaggcgtgcagttgggtgtacaacggggttttccaactttaggggcagaagcttttccaggtcatttagccgtcaacaatcagttgaaagcctttatggaagaaggtggcgaagtctatgcctgccgttttgcattacaagcattttatggtcaaaccgaaaaagcgcttattccgggaattcggccaattaatccattggatgtgatggatttaagactgctgatgcgtcgcgacaatgccttagtcattgatacctggactgcctaagtaaacataaaccacgaggggataaggttatgaaccgaatcattaaagccgccgcagtacaatgtagcccagtgctttatagtcaagccgcaacagtaaaaaaaatctgtggcattattttagagcttggaaaacagggagtgcaattcgcagtctttcctgaaaccgtcgtgccttattacccttatttctcctttgtacaaccgccatttgctatgggtaaagagcatttaaagctattaaatgaatcggtggttgtaccttccgaagcaactttagcgattggtcaagcctgtcttgaagccaacatggtggtatcgattggcactaatgaacgtgcgggcagtacgatttataacgcgcaactgttatttaatgccgacggttcaatcattcagcatcgccgcaaaattaccccaacttaccatgaacgcatggtgtggggacaaggtgatggcagtggtttacgtgccattaattctgcggtagggcgtattggttcgctggcctgttgggaacattacaacccgttggcacgttttgccttaatggcagatggtgagcaaattcatgccgccatgtttcccggttcattggtagggcaagtctttgccgatcaaatccgcgcaaccattcaacaccatgctttagagtctggctgctttgtgatcaacgccaccgcatggctgcatcccgaacagcaacggcagattatgcaggatactggctgtgatatcggtccaatttcaggcggatgttttgccgccatcgtttctcccgaaggcaagctcctggctgaaccgatcacacaaggtgaaggttattgtattgccgatctggactttagcctgattgataaacgcaaacgcatgatggattcgattggacattacagccgacctgaattactcagcttaatgattgatcgccgtccaacacacgtattacacgaactgaaagtcgaaacatcagttcaaagtcatcccgaaaagctctcaacatttaatgaagaacatgtcgaaaccatattgatgtaaacccaatcgatagggggttaaagatgtctgcaatacaacgattaaccgatttgcaactattaaccgatttacaatgtaatggtctgaaatgggaaggcaattttggcttgtctcgtaaaggtggcgcagggccaagcgatcataaagcgctgagccttgacgggcagaccatgatgattcctgtgctgaaccttgcagtacaagattctccctacaccgccaagcctgaaccgcactctgacaaggtgattgtctttaaaaaccggattcctgtggcgaccttaactgcacctgcacgaccccgtttttatgatttaaaaaccgccgaaggcattgcctaccaacaaattgccaccttacatagccgtgatgtgctggcgacaacggtgttacagcattgcattcgtatgaaggacaaagcaactgcctgccaattttgctcgattgatcagtctttaaaagagggtcgaaccttgatccgtaaacgcccggaacaattggctgaggtcgcgaaagccgccgttgagctggatggcgttaagcaaatggtgatcaccacaggtacgccaaacacaggagatcgtggtgccaagattttatatgactcagttaaagcgattaaggcgcaagtcgatttgccaatacaggtacagtgcgaaccacctgatgattttgcctggttccaacgtttaaaagatgcaggagcggtgtcgattggcatgcaccttgaggcggtaagcgaacgtgtacggcagaaaatgatgccgggtaaagccgaagtctcgttggaaaaatattttgcggcgtttgaggcagccgttgcggtgttcggccgaggacaggtcagtacctacattttggccggtttgggcgataccgaactggaaatcgtggagatgagcgccaaactgactgaaatgggggtgtatccatttgtggtaccgtttgtgccgattcgaggtacaccattagagcatcaccctaaacctgatcaagcttttatgcagtcgctctatccgaaaatcggacaacaactcaaacaacatggtttgaactcggaaaatactcaagccggctgtgccaaatgtggcgcttgctcttcgctaaaagcgtatgaataaggagaatgtgatatgaaactttctcactatccttggctgcttgagccaaatgaagggcggaaacaatttgttagcgatgacattgccatcaaaattgtgtcggaagattgggagcgtcgccaatattatcgtttgcgtgaaatgacctttcgcgatgaacagaaaatcttgcaagaagatcgtgacgaatacgatgttaaagcattaggcattgttgccattgagaaaatgttgggtgcgcatgatcgagtgattggcgcagtacggattttcccggatggcgaacagacatggtatggcgggcgtttatgcgtagaacctttatatcgacgtcgccatatcattggtaaagcgttaatcaataccgcggtatcgaccgccaagcacttaggatgccgtacttttttagccaccgtgcaaagtcaaaatgaacactatttccaaaggttgtgttgggatagtttgcgtcagttaaccattgccaacattccacatgtgctgatgcaggcacagattgaaaactatccattaccgcatgtcccaatgcaagcctatatgcaaaaggagacgcagtgatgaaactcaatcaattactcgaaatgttaaaacatacacctgcaatgcagtccaagcaggcgattgctcacaatgtttcaattgacacaacttgccatatggattcattggatagcttatatgcctatcccggagatgacacggcggcagtgtcgctaaatggtcaatatgtattgcacgcctgtgaaggcatgttaccaagctttgtgaccaatcatccttactttgccggatggtcagcagtcatggcgaatattagtgatattgccgcaatgggtggtcgggcattgtcggtggtgaacagtttttggcataccagtagcgaacatgcccagttgttaatgcaaggtatgcaggatgcttgtcgtgcttatggtgtgctattggtcggtggacataccaatattggggtggtttatcagcctactttatccgttgcgattcaaggcatagcacgaaaactactctcggtgttgcatgtcaaaccacaacaaaaaattctgattgctttaaatctgaaaggacaattccaccccaataccccttattggaaatgctttgagcgagtgtctgaccgcattttacagtcacaaattgccttgttgccgcaattggcggaggcaaatctggttcatgccgcccgcgatattagcaacgccggtatcttaggcagtttattgatgctgctcgaagccacagcatcgggggcacatatcaatttagataccattcctaaacctgagaatgtggactggtttaaatggctccaaatcttccccagttttggttttttactgacggccgatacaaatgaatgtgaagaaattattaagctgtttcaccgtcagggtattgcctgcgcggtgattggtgaaaccaatgccagtggtgtggttgccgtgcagcaacagcagcaatacggaatattttgggattttaaccaccaaatgtttaccggtttttgttatgccgatgcgttaaaaaagttacaggctaaatccgtacagattaaacctaaaagtcagcaggagtcgatgttatgcccagtgtgaattttactgtgaaatggcctaatggggagctgattcaatattactcaccctcaacggtgatttatgaatatctgtccattggtcagcattacccaagtatgcagttcttgcatcaagttgaaaatggtctgcatgccgcatcggaaagggtacgggcacgttatggctttttctgtagttcagccgtggacaatctggcgataatcaaacgccaagccaaattcttcgggttaagtccggaagatcaaattgaaattatcgaaatgacgaatcaatgagagggatattccatgttaagtatccaaaatcaaatgttacagccaaattatgatgtggtgattattggtggcggtcaggctggtctatgtatcagtcactatttgcaaaaagcgggtattgaccatgtggtattggaaaaagaatccgagttgacccatagctggtgccataaacgttggaataatttcactttggtgacaccaaactggcagtgtctattgcctgaacacccttatcaggggaacgaccctgacggctttatgaaaaagcacgaaattgtggcatatcttgacgaatttattgaaaaaactaatcctcccgccattttaaatattcaggtagaacatgtgaaaaaagtggcagcgcatgagtttgtcattgaaaccaatcacggtacaaccacagccaaacagcttgtcgttgcagcaggcgggtatcacaccccgatttatccaaaattaagtgataccttgcctaaccatgtgaaagtgatgcattcggaagagtatttaaatgtagagcaactgcctaaaggtgcggtgctggtggtcgggtcaggacaatccggtgcacagattgccgaagatttacatctggcaggcaaaaaagtctatttatcgacaggcaatgcaccacgttgtgctcgcttctatcgcggcaaagatgtggtgaaatggctgtttgatatggggtattacgaaacgactgtcaaacatcatcgttatagtgaagaggtacgtaacagtactaaccactatgtcacagggcgtgacggcgggcgtgatattgacctgcgtaaatttgccttagaaggtatgcaactgttcggacattttgatgactttaaagagggtcaattctggtttaaaccaaatttatcagaaaacctggaccttgccgatgctacttataatcgtattaatgcctcgattgatgagtatttagagaaaaacaatattgcaaccgatgaacctgcatcggtatatcaaccggtttggcagcctgagcaggaaatcacacacattgatttagcaaaagaaaatatgacttccgtgatttggtgtattggttttaaaccagactattcatggcttgatttagatatttttcaaaccaatggttatcccaaacatgaccgtggtattactatcgatccgaatgtcacatttattggtttgccgtggttatatacatggggttctggacgttttctggggatcgatcaggatgccgcctatgtggtgcaacatattgagcaacaaataagtcagcaaaatatacatatgccacctactctaattaaaggtgctaaatctaaaatcaaagataaaagaatatctcaaatgtgaaattcctaacttcacctgacagaatatttttaaacactcattttgatgaatttttggcttgcttaaatctatccggcgtcactgtaggcaaggagcctgcgcctcgatgagttccgcgcctgatgaaccttaaaaccttgtcggcttgaaagagccattttttatgttaggtttctcatcaggccggtaggccgttcatgtcatcaataatcagtcttcgcaaaaccagtggggtaacatttaaataggttcacaatgacgccagctttaggcgacaaataccgtgtgttgtgtcgtaatggcccacgctatccgggcgagtttattagccaatgcacaggccacgatattagagtgctttcgttcaagctgctgcttaacccagtcagccagttttccctgccggtgttcaatctgttgcatgaatgaccgggcgcagagtaccaacagttgccggagcgtcttattaccccgtttactgatacccaataaggtcgtccttcccccggtgctgtactggcggggaaccaaacccgtcgaggccgcaaaatcccggctgcgagaatattgttttccatcacccagttgtgaggaaagcacactcgccgtgatgggaccaataccggggatcgtcatcagccgttgtccggtatcatcctgaatgatttcctgtgacagtgcggtctcaatctcggtgatttgcccaaccagatagtgataatgcgcctgtaaccgtagtaatatttgcgccaaataaggtggaagaggatgttcggccaaaacagtggagagtcgttttatcacggcaatccccttgggcatactgatgccaaactcaagcaggaaagcttgcatctgattggtggttttgactttatcccggaccagtgattcccggacacgatgcaacgctcgcatggcttgttgggcttccgttctgggctgaacaaaacgcattgaaggtcgtgaggcggcttcacagatggcttccgcgtcaataaaatcattcttgttacttttgacaaaaggacggacaaactgcggtgaaatcagcttagcctcatgccccaaatcagcgatccgccttgccatgaaatgcgcgccagcacaggcttccatcacaaccgttgccggagagcaatcggctaagaattccatcaatttagttcgggtgaattttttacgtagcagagcttttcccgatggctcctgacaatggacatgaaaagaatgtttgccgagatcgatgccaatcagtgcgatagtgttcatgatggtagcctcttatcaaagataatcactctgctaatatactgccgttagagtgaggggaaccatctcattaccttggggcatttatgtggtaaagcagctaaagaagccactttaacgtataagtattcatgggccgataatgggtaatagtccggttgaattgcccactttaccgctaaataactcaagtgccccagacttttttatgctctcccctagttgctgagtataccatttctggtatactgaattcacacaataccagaaaaggtataaacaggatggagcaacaaagtgaaaagctgctagtgtggataggcagcagcaagaaggacttgctgaacttgccgaaggacgtgcagcgcttctttggctttgccctagacttcgcgcagcgtggcgaaaagcatgatgctgtgaaggtgatgaaagggtttggtggtgccggcgttctggaagtgttggaggacgacataggtggtacctaccgagcggtgtatacggtgaaatttgacgaagcggtctttgtgctacatgcctttcagaagaagagtaagcacggcatagcgacgccgaaagaagatatggacatcatccgtaatcgactgaaagtggccgctgtgatggcccaggagatgaaaaatgaaagagaaaaccattaatggcgtagcggttgaaatcagctccggcaacgtgtttgccgatctgggtttccgtgatgccgaaaagcacaaaattaaatccggcttggcctttgagatcatcaaatctatcaagcgtctggggctgacacaaactactgctggcgaacgtattgggatcagccaggcaaaagtatcccacctgttccggggcgatttttccaacctgtcagaacgtaagatgatggagtgtctgaatcggctggggtgtgacatcgagatcactgtcaagccgactactgcccaaaccgggcatttaattttggcacatagcgggtaaggtaaatttgcccatctctgattagcggtgggtaaagaccaaacacattgaaagttatagaacataaaaatctatggttcccctcgtttttgcaacactcattttgatgaatttttggcttgcttaaatctatccggcgtcactgtaggcaaggagcctgcgcctcgatgagttccgcgcctgatgaaccttaaaaccttgtcggcttgaaagagccattttttatgttaggtttctcatcaggccggtaggccgttcatgtcatcaataatcagtcttcgcaaaaccagtggggtaacatttaaataggttcacaatgacgccagctttaggcgacaaataccgtgtgttgtgtcgtaatggcccacgctatccgggcgagtttattagccaatgcacaggccacgatattagagtgctttcgttcaagctgctgcttaacccagtcagccagttttccctgccggtgttcaatctgttgcatgaatgaccgggcgcagagtaccaacagttgccggagcgtcttattaccccgtttactgatacccaataaggtcgtccttcccccggtgctgtactggcggggaaccaaacccgtcgaggccgcaaaatcccggctgcgagaatattgttttccatcacccagttgtgaggaaagcacactcgccgtgatgggaccaataccggggatcgtcatcagccgttgtccggtatcatcctgaatgatttcctgtgacagtgcggtctcaatctcggtgatttgcccaaccagatagtgataatgcgcctgtaaccgtagtaatatttgcgccaaataaggtggaagaggatgttcggccaaaacagtggagagtcgttttatcacggcaatccccttgggcatactgatgccaaactcaagcaggaaagcttgcatctgattggtggttttgactttatcccggaccagtgattcccggacacgatgcaacgctcgcatggcttgttgggcttccgttctgggctgaacaaaacgcattgaaggtcgtgaggcggcttcacagatggcttccgcgtcaataaaatcattcttgttacttttgacaaaaggacggacaaactgcggtgaaatcagcttagcctcatgccccaaatcagcgatccgccttgccatgaaatgcgcgccagcacaggcttccatcacaaccgttgccggagagcaatcggctaagaattccatcaatttagttcgggtgaattttttacgtagcagagcttttcccgatggctcctgacaatggacatgaaaagaatgtttgccgagatcgatgccaatcagtgcgatagtgttcatgatggtagcctcttatcaaagataatcactctgctaatatactgccgttagagtgaggggaaccatctcattaccttggggcatttatgtggtaaagcagctaaagaagccactttaacgtataagtattcatgggccgataatgggtaatagtccggttgaatcgcccactttaccgctaaataactcaagtgccccagacttttttatgctctcatttttacgctctcctgtggaagaacccccaaatttgacgatcaatttaatcgaggatctaaaatatctattactttagctaagacttcatcaacgctccacataagcatccatcacaggctgacgatgatccttattacctgtcaaacttaatgaggttcctgtcataccgtgaaaaccattggtaaaagcaacgactcgacagcgttgggttactttacgtgcaagcttaatcgccgattcaacaacactgctaccagtcggtgaagtaaactgtagtttataggtcaaccctctgggtaccagaatgttttcttgaaaagcggtgataaagtcttttttcgctttagtgtgcaaatccaatgcaccttgaataccatcttcattgatgtactgagatacagccagttttagtgcgtaatggttatgcccataattcaacgcccctgcacaactgagaaaatcaagatatggcgagccatctgtttaagttctcctccaaatgttttctgaatgaggctaatgtaagtcagcctcgtagattagatttctgcgtttacagcaactaaaaactgtgaaatcaaataccaaaaaattaactatccgacgataattaaataatctgctcggatacaaatgctatgtcttctatcttttcactaagtcgttcggccaacgctaaagcgaatcccgtgccataacgtttttcatctgctgtcacatttattaaaataccttcgcctttcaaatcatttatcaactcaaccctaatcggtaagctggtatggtcacgcacatcttcatcactattcaccaacccttgctctaataactcattgcgagaatgaaaatgaacgtagctaaatgcagcctcgaagggtggccctcctaacatggtttgtatttctgaatatggaaagcgtctaaagggcaatatttctttttcagcatcgaaagactgtcttgccagtgcctgccagttattagcagagtcaagattcaactttatcggaatatgattaaggaacagtccaagagttaaatccgcaccttccatctcaggcctaccgttaacagacatccctgcaacaaagtcaatatcttgtaactgatgagctgttgtcagatagaaaccagcaaaaaacatactttttaacggaatgccccaatctgatacattttttaacaattgctccactgttctttccggcaagaccagtactgctttcctataatcagtatcttgatatctatccgttttttctttagctgaatattgactaaaaaactgtttcgccttgtcgttatcgagcgcttctcgctcaagtctgacaaactctgacaatggtgccggttgctccaataaaacagactcgctaactaaattggcttgatacaatctcaaaagctcaaggataaaaacagactcactccaaccatcaaggatcgcatgatgaaaggcataagctaaccgaaattgtccttcattcaatgccgccgcatgtaccctcattaaaggagcctcttcaggatcaaatggttggcttaactcaaccattactttttcgtgacgtgcagccaactgttcatcatcaagatttgtgtagttttccactataagtggcaatgatggtagtgattcaaccaattgcatcacttcactaaaagaggccaaatcaaattttgttctgagaaccgggtgccttttggctattgactgaagcgtgtcgtgaagtattttttcatccagtggcaagttgacatcccgagcaataacatcaaggtagattgctttaccactgtataatccctcaaacagcatccctagctgcaatctcgtcgccggataagcagtttcgatattaacaggcaacctttgcttatccgtttcatttatcagtgggttctcattctgctgactgagagcttcttctgtttgtgccaaaccgcggcaaaccccacgcaatgccggattgcgagttagtccattatctgtttgttctgggagcaccaaatctttacacatcgccctaagcgtcgaggtacgaaataaggtagagagtgtcagattgagtcctcgtttttcagcttccgcgataacctgaatagccaataacgaatcgcctcccaacgcaaaaaaatcagcatcaggcacaacatcaaatggccctagaatttgttgccagatctctgccaccagtgcttctgtcatggagagttcaccggataccacctcttctaatctctcagcctctttccaacccatcaaaaatcgacgatccactttaccactgcttgttaaaggtagctgttcatgctgaataaactgactaggccacatatagctgggtaacaatgtttgaacacgagtgatgatagcttgctcaacatcagtgtttttatgagttgtatgatcaatgtgagttgtataatgggcgaccagttgttcaacatggcgatcactgtcaatgttcagcacaacacaaacagcactcacatcctgacagctttttattgcatgctctacttctgccagctcaactcgatgaccccgcactttgacctgatcatcaagcctgcccacaaactcaatcagtccatcattcgacaatacgccttcatcaccagtagcaaacattctggctcctggttgggtggagaaaggatcaggtaaaaaacgcaggctagttagcccaggttgatataaatacccccgtgcgacagactgtcccccaatatagatttcaccacgctcacctggcctgaccggtcttaacatctcatccaataagtacatttccgcattgacgataggtttacctaagggagattttatcgcatcaatacttaatgatgacatagagtaactactcaccaaggtcgttccttcagtcgggccatatacgttattaaataaaaagtgtttgcctaatttctgcttcctggacaaatacttaaacgcatgagtgactgacattgcatcgccaccaacaagcaattgaggtacgctatccagagcctcttcgcgataatctaccaatacgtgaaataaggcaggtgtcagtagcaatatcgtaattccatgttcaacaaggcatttcggtagctcatcaatggcttgatatgaaggagaagccaataccaatgccgcgccattagtcaatgctccccatatttcaaaggcagaagcatcaaaagccgcaggtgctaactgcaatattttttcattaggtccgaaatgaacgtactgctgtttctggctaacgaagttggtaacgccatgatgagtcactcccactcctttggggcgtcctgtacttcccgaggtatagataacgtaagctagctgttgactggtaacttgtggcaggatttttggcactacagattggatttcatcgatataaacagtggcaacattttcaatgaccgttgaatctttcatcatagttcgagttaacaccaaccttgtacgcgagtccgttatcatataacgaagtcgctcagtcggataatcgggtgggagtgctaaataagcagcaccaactttaagcgcagccaacatcgctatgatcatgtcagaagagcgctcaatatggattccaaccacatcttcagccccgatatctaagtccattagtcgataggcaagttgggtagcacggtcttgcacattttggtatgtcatttctacatgatgtgcactaatggcgatcttgtgaggagcattctcaaccatcgcatcaaattgttcatgcaacactattcgttcatgcaacactatgcgttctttcattatttattcctatgaataatgtgcagcagtcaatttgactggcaagcgatggtaaccagatagaaaagtcgaatagatagggctgggttctccactcaaagagatctgatcaacgagctccacaagcgcctccagcagtgcaataatttctattctggcaagagcggcaccaaggcaaaaatgagccccatatgaaaaagaaatatgccgattatcactccgattcagatcaagctgattgggtttagtaaagacggtttcatcaaagttagcagaccgattccaaacaatgacaatatcaccagccctaatctgctgaccgcctaattcaacatctaccgttgcggtccgaccaccatgtaaagccggcgtggtccatcgcaacaactcctctactgccttactaatttctgcttcaccacgtcgcaattgagcccagcattctggatattcggcaaatgcttttatgatccctatcaatgccaaccgagttgtttcatcgccacccagtaacacgctataacaattgaagacgagttcttcttctgttaatgccagggagttttgagtcattgctatcaggttacttataagatcatcttccaatggcgcgattttgcgagtctgaatacatttatagaaatacatcaacacttcatttctggcgaggcgggtatctactttatcaactgacaaagagttcgaagccagtgctgcacttgcattgacaaatagttttgctcgatccgattctggaacttttaaaatgtcacatatggccgctaacggaatatgtggtgctacatcagtggcaaagtcacattgcccggatgttactgcattacgtacaagctcatgcatcgcatttttgattcttttctgtaccgacatcaggttcttagggctgaaagactttaacaactctttacggatttgacggtgtctatctccatcagacactgcaagcatgcgaccacccgctgtgtctccatcatgtaacagtgtagccatgacatttccacgaacagaggtaaaggtttgactatcacggtaaacccgcatagctaactcatgggtgctgacaacccaaaatcctgattgaccattgaccgcaggatgccaagcgacaggtgactcattacgtaattgccgccagatgttatctatatcaggacgtaaatgagtcagggggtcagtgagatttatgttatccggcactttagctacgtttgaaataagattcatatcgcccccaattcatgcgcatcaagaatttgaacggcttcactgtccataaatcgaacatgaaaacgcaagcactgccccatacgctgataaatatccagaaatgccttatggttatccactttgcccaacaccatgttaatttcattggtttgtgagcctcccggcaaagtagctcctgcccatacatatgggcgatatgacgatacaccctcaagagagagaagttcatcttccccattaattcggagaatttcacatggacgtgttggcgcaatatggcagatattgaaatagacgtgctcaggattgaacacagggagatcaatcatttttcccagcgctaatcgtgcagccatttcaagcagactaatattgaggctgattttggccatctcgttgatacccccgcccactcggccatttacttcaatgatcctgggtccctgctcggtcaacttcagctcggtatgggtgatcccccgattaacccctaacacgttgatggcacttgacgttaatgcatagatttggttttgttcactatcacttaaaactgatggccagatatgaccatattcacgaaaagggggactaagtggcatcttgccggtcacatttatatgcttaatctctccgttaaccaccaagctctcaaccgagacatagtcaccaaaaggcaacgatggccgcccctggaggaactcttccaataccagtgaacgaccaccatcaaatccaacctgtttatttgaaagcagtttttctacaaggctctttcctgtttgcggatcttcaataagataagtatcgatgctgccaccaccataggctggttttaacactgcgggaagacaaacctgttcaacagcttgctcccaatctgacacagtgttaatgaggtagaatcttatcgactcaatgccagcctcttgtaaagccactcgctgcttatatttgtcagtaagccgatagaccgtttcgagattgtgaaaaggcaaattcaagtgttttgccagcgtagctgtaagacgtaaggcacgctcactaaatgtcacaatccccgcaggattaaggtgagcaagttctgataccgcccttgcaatatcagaaccatcaactacgtgaccaaatcgtgaaaagtaggatatgcgctctcttgtgtgttcgtttgaattgataacaagtacaagtggtgcaaccccattcaattcagtgacaatatctttgggaagggctgcgccttcatcataaatcactatcagaggttgattatcaaaggattgtgggccattacgcagagaagccgggcgcatatcggtccaaacttcttcaatccattttttacatgcttcttgcgtcccactaaaaccggtcgctcgccatccggtagcgacaggccattcagaatgaacacaggcatattgctcttcatcatttattacaaccaaatattcatccgtcaaaccttcaaaacgggatgaatacttcatttgtgtttgggtattttcatcactcattagcgcagacttccttcttttaagcaagtttgacggatatacaaataaatgtcgtaaagctgatctcgataatagaagtgatctccagggaacatgactaattggcaagaatcatgtgtcagcgattgccactcttgtaaatgatatgggctcacccacgggtcacgatcaccgccaatggctaaaatagggcaatgtaccttgccactggcttgtttgtgctcagccactaacaaataatcagcacgcaatacaggcaacatgagatcaagcacatccgcatgaagcagtttcttatcttcatttcctatattggtttttagctcttcaatccaagcttcccggctcatacggagtatctcttctggcaccatactattcaaatgtggtggacgtgctgctgataagaccaaatattcaacggttcggttagcttgttctaaaagtaatgccagttcatgacataacaaagcgcccatactatgaccaataagaagaagaggcccctgtgtatgcagcaatacatcttttgccgcggtagccaccaaatctcttatacataaagggagtggttcaatacttcgagaacctcgtcccggatactgaagcaccagcactcgataactatcagtcaacagttgctgaacccagtcggtcatagaataagcactgccgccgccaaaaggcgcaatcacaacagtcattgtcgtctgctgtcgatcgcagtaattccataatcctggcgtcagttgaacacgtttcattccaacgtctctgcggaaactttcaatttaggatcactccaatatgtagctatccaatccaggcattcttgttctgatcccgaaaaacccacattttgccaccctaacggtaatatccgcccttcaggccaaatggagtgcttaccctctttgttacataccaccctgtaattcatgatgtttcgctccgccgtttgatagtcaccacttgatccgcctgagcaagcaggtcaatattttgcgaggctacaatccagatccccgaccactttttaggcagtgctgaccatatggctcgggcggtatcagtatccagagatgaatcgcaatcatcgacgacataaacttcggctgaatgacatagcatacgggccaatgtcaaacgttggcgctggcctcctgataactgtttgacactaccggaccccagcacagtatcaagcccttcaggaagatcagatgaacccggtttcagatatactgccgttaacgcccgctccatagtttcatcactgacagcgtcgttacccagtgccaagttatctcgaacagtaccgccaacaaagccagcaccttgacgggcataagtaactttagggctttgccaccaatcgacgtctccacaaacttctttgttattccaaagcacacttcctgataagtgtcgttccagcgcgagcagaccgcgaagcatacgacttttaccggaacccacttctccattaacgacaatcagttgattgggtgtggctgtaaacgaaataggttgcgtatcgctattgcaacaaagccccctcactgtcagtgatttcaggatgtcatcagcaataggggcttcgctggcaggctgctctgtctgtaacagtggctgaattcgctcgtagcagacatcggcatttttatagttagccaaggcgcgaccgaaaaagaagatctgctcactgacccaaccgatataagtcaaaaacagagccaatttaccaatagtgaaatcgccactgacaattcgggtactgacaataatcaaaacaatagatgtacctagcatcacgatgttacgaaatagccccgacagcagatcagtgaacatttgatgctttgcctgcaccgcccgacgacgttcaaaacttgccgaaagtcgctcaatatgcagatccaactttccaccaaggcgaaggtcacggattcctgccaatatgtcggtgatacgacccgcaatttggccttgatattgacgtttctcctcctgtaatgctccgaccttatgtttgagagctatgcccagccacaaaccaccagccatcggtaaaagcgccaatgtcgtcacaatgtcagtactcagcaacaccacaagtgctatcaacaatagtaccgctcggtagaagaaatccgctgtccaaccgagaaaagaggctacttcatcactgtcattacgaatacggttgagcatatccccttgagaaagacccagatccgcgccagagtggctgcaatttattccctccagaatgcgttgtttaagatatgcgctgaccttaaaaataagggtaaaatcaatctgtaagccaaaaatcagtatcactgagcgtaataccattgagcctaccgccaatgccaatagccaccaaaccgctgagcctacgggatcgataacagcactatcaagaagctggctgatggcaaaaccaacgaccaaaggtaagccgtggatcagcgtccatataaccatgctgatgaagtaaagaaaggaaaatctgcgcactaaactcagtaaagaaggcaacatttttgatgggaaaaagtgggttaaccccgtcatgatataagttccctatgttttgttaacgttttgatccctgcgccatgaaggagttcctcgacacggccttcattcatgataatgacttggtcagcagtggataatgtgtgcaggcgatgggcaacgatgatcacggtacgattagcgctaattttttccagtaatctcatccaactctgctcagtgcgaggatctaatagcgaggtgccttcatcgataatgattaattgtgcgtcttgaagcatggttcttaccccggcaatcatttggacttccccttccgacaatgaacgccccccaacccccaccaaagtatccagcccctctggtaatgtcttcgcccatttatggatctctaactcttcgagcgcgcaccaaattgcatcatctgaaatgctgttatcgaacagagttaaattttcgcgtagtgttgctgaaaagagatacgctttttggcttaacactgccacacgattggcaaattcatcaggatgaatggaagtgacctcaacaccagcaagagtaacccgtccgctatcaggctgagccaacccacacatgagattgagtaatgtgcttttacctgcccccgtgcgcccaacaatgcctactttgcttccagcgtccacactgaagctcacgttatgtaagacttgcttaccctgactttcatagcgaaagtcaacctgatcaaattgaactgacagggggccttcaggtagctgattctctacactgttgtgattgactttctcctcatctcgcaacatcttgactaccagtgataaggtcgccatcaattgttgtacctgatctacctccgaagacatctcttccattggctctctgagtcggtcaacataaagataaatcatggttaacgtaccaatactgatactgttatgaccgagtaattgcagcccaaatccaaaacccaggccaaaactcaaggcaaaaaatagctgggtaatcggccaaaatatgcgtccgctgacataggctttacgttccatttttaataagccagaaagcatcttctgtagttgcaaagcaggccaacggcgtcttcccaatgaatgcaaatcatctttcgcagcaagagcatcgccgataaaaccaaatatgtgggctttctcttcacgggcttttttccatcgcactactgcaaggttagtaagtttcaccagaacataagccacaacgagaactaacacggtaattgcgatacctacttctgggataatagaaaacaaaatcaccaaagtacctaatgctaatgcgatattgcctataattcggaatccggattccgcaatagtttttccaataatgtccgcattcccctcaatcttttcaaggagcttaccctgagcttcactttcaatttgcaggatagaccgattgtgcacaacatgatgaaatagctgacgcctaaacgcatcggcaataccccaacctgcactggtactgcaataactggtaaccagaccagcgataacaccggcaaaagagatgattgcgtatcctaaagccaagaggacaagttcataaacaaaagtacctgcggtcgctttatcaatgtaatgacggatcacaaatggccccgctaaatcacaaaccagtgtgacaactaatgccagaaaggtgccaataatggcttttttcattgtccgggcgctctgccaaagcaacttaaaacctgttaatgggttaggagaattcataccttgcatattcgtttgtattttcatattaatttttatgagttatccgttcattaaattcagataggaccgtttttatttgctcttttggcatgacatcacctgcaaattgagcacgaatttccatctgcccatcattcacactgatgttaaagcaaagcaaataatccatcggtgttacctgaggcttccagtaacccgttccctctgtggtgatatcaataaagatcggattaactttctcctcatcaggtgtattcagaaataaaagctctccttcaaaatccagtcttaattgtggtcgaggaattgcctttaatttttcggtgattttaggattaacagaaagatagcgaagtgcttcaaagccaaaccctcgaacaggtacctcacgtaacaaccgcgccacatcagttgcatgttcatcaaaactgcgtcccatcgaaaagggcaacaggaacggaaaaccacatgtaaaccagccgatagtgcgtcctaaatcaacttcgtcgaataggtcttctcgaccatgtcctcccaactcaacaaggatattgttggcactggaaagaaaatggctttctaaagaccgcgcaagcagagtcagtaatcgggcaagtacgggaagttgactgtgctcagatggttttaaaaactgctgagtctgtacttcatcaaatactgttgtttgctcaaccctattcgcctcaatgccaatagcatccgtacttactaactgctgtgcctgttcataaggttgtgaaagccaataatgaacaccaaacaacgctggatcatcctgcaccaatcggtgtaaacgcctggcccaagcgagatacgaagttgtcggaatatctaattcatgggcttcagctccgccaagcaacgccgctaaatcctctgtaagtaaatcccaggaataaggatcgactaccaagtggtgaactataatcaacaacttgtccggcaaattatgagcagttcgataaagttgtatgcggcagattggcccattcagcagatctaacgacttatgacctatattcgctaactcagtaattttctgcgataagctatttagggctatctgctgcaattcaaattgttcaattgcgatacgggcttgcgggttaattccttgccacctccccaatgtagtaaccataaagctggctcccaaaatagggaatcgggccaatagcgctgctgctgcctgttcaacagtctccaatgacaaagtgcgactcagtgtaaacaacacaccatgattacaatgattttcatttggattatcacgctcaaaaaaggcatgctgagctggtgtcaaaggggccagatcacttaattcattcggtgcatatctgactttggttagtgcactcttccacttggctaacaacacattaattgcagcttcattatgacgggaggggatgtactcaagggtaataatcagtttcccatcaacgatggccgcattgatttcccattccagtggacggtgccccgttgctgcccgccgcattccaatatcttcttctacactgaaaaagccatcattctgctgcttcgtattgaagcgccctaaatagttgaatccaatatttggattctgctccataacataagtttgttgtaaatgggtcttgatatagggactagcttcaaccattgcagtcgcaacttcgactaccgtaaccatagcattgaccggtagcacaaaggggcctattgttgtaaaccaccccacagttcgcattacgtcaatagacttgttttcctcttgcctgccataaccttccaactcaatcaagagttgaccgttaccctgttcaacagcaatggtatttgcaagtcccgtcaaaagaaccgcaggtattcctccgttaggcactaatgccgaaatttcctgaatatattgtgtttctgactcagataacttgacctcagcaaccgaacgtttgccataaaggttacttacatgactattcacctgtaccacatcaattggtgcagttaactggatcggaggaagtatttggggagatattgctgcttgttgctgagaccaatagagatattgcgtgcttttcctcggaaacctcggcatttctttttgaataatagcctgatacgcagtttcaagatcttccagcaagatttgccaggaaacttgatccacaattaagtgatgtaatgtcagcaaaactcgaaaatcatccaacattacaattcgtagtaacggtccttcctcgattgataatgatgcatgagcctcattggcgatggtttcttccgaacaatctgattcagcgaaccaaagtaagttgtcataaggcgagcgcaaggcttgataatgctttcccttctctttgggaaaacaaactcgcaattgttcatggtgctcaactaatgactgtatcgccaaggataatgcttctgcatttaacggctccgttgtactgatcacatgtgactgattccaatggtgctgttcagaaaatcgctgctcgaaaaaccattgttggattgatgtcaatggtgctttttctatacgcggagttgaatttgctgccatttcacctttggtactcgccagttttgcaagtgaagcgatagttggatgttcaagcacatgacgaggacgcaaattgatccccaaagagcccgcctcatgtatcagacggataccaataatggaatccccacccaaagcgaaaaaatcatccgtgatgcccactttggctagcttgaggtatttacaccataaatcacaaagctgttgttccaacttgctgcgtggtgcaacataagaagcagattcaggttgttgttttgccagtgcctttaattgcttacgatcgactttaccattagcattacataacagtgcatcaagaaaataaaacttgctcggcaccatataatccggcaattgctcagccaaaaatttactcaatgatctggcatccacaacggtatcactcgtctgcgtcacgaaagcacttaattgctcaaagccactcatatcaacaagttcaaccgcacacatcgctacatccggatggtttgccagcaccgcttcaatttctccaagttcgacgcggcgaccacgaatcttcacctggttgtcggcccggccaaggcactccaatatgccatcctctcgccaacgaccacgatcacccgtccgatacatacgggcacccgggacaggcagaaatgggtccggcaaaaaagccgccgccgtgaagcgattactgccgatgtatcctcgcccgacattcggcccaccaacgaaaatttcaccaccgaccattggaggaacaagttgaaaatctttatctaatacataaattgtcacgtttggcaaaggcgtacccactggacaatatagcccatcagattgctcttcgacctttccttgagtcacatcatcggtacactcagcgggaccataagcatttagcagtgtcaccattggcatacactgatgccagcgacgtgctagatccgtacttaacacttctccagttgagatcatcccacgtaactgccgctgaacccgcatcttcaatgaaatcgattgttcaaggatatccaggataactgcaatgagcgaaggaactagttcaatatattcaaatttctgctcaataatgtattgaattaactcttgaggatcttttacaacatcatcagagacaatggaaaccgtcgcacctacggtcaatccagtaaacatttgccaaactgagatatcaaacgaaatgggtgctgtttgcggcaatgtcacccctagtttcaattcacagttttggacctgaaataccagtaaattaaggaaagaacgatgttcaattcctacacctttaggaagacctgtcgagcctgaagtaaagattacataagctaattcgcttggtgatggctcagttacctgctgattaagtaactttatctcatcaccatccactaaaaccgggctttgaaaactaagttcactgaatgagaaccaaactatctgcggcatatccacaacatgatctgcaatcaatgccttcgcatgttttagcatgtgctgttgccgggctttcggtaaagttggatcaataggtaagtaagcaccacccgagaagaaaataccggtagcaacagcaataaatcgagcgctgcgtggtgctgaaagcgccacaatatcatcggcactaatgccagcattttttaacttcaatgctaccgataacgccaactgaaatagttcccgataggtaagcgattctgttttatcacggagagctatcgcatgggggttactttccgcttgctccaacactagccgataaaatgattttcctgagctataatcaggttgggaattgaatctggctagcaattttgtttgcatcgcgtcatcgacgatagccatattatttagacagatgtcgagatcgaaaagccccttgtttaacagtgtcgcgatacctgccgctaagtgatgaagcgtctgagtcgcagcaacaattccactcacactcactacaccatcaataagctcgatagctatcccagtttccgtctgagcgcaattaacgacaataggcatgaaatgctccaaaaacggcatcaacagcgccttgtctatcgatccatgattaatagcctcaacagcggccatgcgaacatggcttaaccattcacgaaaagtcacggcaggaggtaccgtcaataagacaggcaaacgcttgccttgttcggtgttaatatgcaacacaacagaggatacgcccccaatacggcgcaacacgatactagtcactgccgccaaaattgcccatgtcagcaattcagagttgcccgctacttgttttagccggtcagtaacggtggggaaaagcggacattgcgcacttaccagagatccctcatggtgaggaaaaatatctgcggttgtggcagcggccttagttaaatcaccaacccgcatcagccagtattcacgatcaatcagcttcatagttgtcatttttttatccacatctagaactgaaaatctggaatatcgctaagaacatcgtcttgaccatcaaacaaggcgaaaagagtggtttcttcgcctaatgtcatcagccgtgtcagtgcctctatataaatattcaaccagcgagaaaccgtgtcttgtgagaaaagggcagcggaatattccaatcgcgcttgaagctcatcaccatattcaatacaggtaagattgagcggatattttgcgccattaggatcgacatccagcaattcgacaacggctccatttccccctaataccctaataggatcaacatcattctgaaaatcaaacatggtgagatgataggaggtatttgccatcagtttctggattcgatcagaaggaaatgcactatgtgaaatcgcgctgagtgatgcctgcctaaccgcattcagcactacgtgaaatggctggtgtggatcaagccgtgcacgcacaatcacggtattaacataacaaccaatggtgttttcatctttcagttgccggttagccaccggcatagcaacacaaatatcatgctgcgcacttatctgccattgtaatgccacccaagttgtcaacattatcatttgtaccgttacgcgagaattcatcgccatctgcctcaacctctcggtaacatccttcgatatcatcacaggtaaattagcaccctggaggttagatgctgtcccgccctcaccatcacaaggcagcagcagaattgggatgtttgccaaatatccataccagaaagcctccagttttcgaccctgttcactttcaagtaaggtatattgctccatcgcgtaatttaaatagtcgttcacaggcggagatatcttgccaccactaagagctgccaataccaatcgccatgaccagccatcaaaaaacaggtgatgaaaattcagcaatagtgcttgacgtactccatcgctaaaattcacttgcaacagttcgaatcgtgtgggaggaataccataaggtgagagcggcgtttcaaccatctgctgtagacgctgagtcagaacgggtatgcccgttgcaatagtgtattttgttaaatcgacttcactatgaaccagtttgacctgcatcggaggatggattaccgggttaacgccttgttcgttgtattccagactacaacgcagcatcaactgttgtaagacaagttcagttagcgttttctccagccaggcaacatccgcctccgcattgataagcagagcagcgggaacattataagcgccagactcaccagcaatttccgttgccgcccaaattgctaattgctgaccagaaagtacatgtttattgttccttgtttctatctccggtgttgtagatacggaggataattgaacactgtctttcaccaattgataaaactcattcagatccaggcaatccaacaaatccatcaatttcagatccgtacctaatacctcgttcagccgaaccacaagctgctcaccattaagtgaattacctccagccgcaaaaaaatcatcatcaagtgttaatttcggctctttcagcacttctctgacctgagtcaacaatatctcttcaacattttctcctgaatttgatatcgaagtgtgcggtacaacatcagaaaccatagcagagttctcaatagtctctggccagcaataggtggcaacaaaaggagcaaatggcagttcaagacgacgatttatcttgcgttcacacccttgctgccaatccagattggtgccattgacaaaccaatctccaagcaatgtcaacagagatctttcactatcgtatgactgataacccaacgtgttaatggctgttgcaagctcaccacaacgactgaatctcaccaagcatagttcagcctgttcttgcaacaaggtttgcaaacgctggtgatcaaatgttgaatcagtgaccggttcatcagcaagacgcaatgcatcaacaaattcaagaccaccatcgacgacctgtgcggccaatttccccacaccgtaggccagtaataagtcaattgtcaccccaaacgctgtcaataccgcgtgatgtcccaacaaccaaataatccagcgctgccgaagcgtccaagttttccctgaacataagttctctgcttgttttattacacgatgaaaagctggaaatgtttctcctcgtttcatcaatagttgaatatctattggagagcattcatcaaaaataagaccaacagataacgaagatgatggtgaagatgaagatagcgagattgaaccgtggttcgtgagttgctgcactaaatgcgaaacagatgaagccacacagctccaacgatatgggaaatgctcccgtcccaacattaatatatcggcaatctcgtcaattgatgcttcggttgaagataacgcattagttatagcacttaggtaagtgctgagatcttgtgtcgtctgtgccgatatcagcaccaatctctcatttatctcgtattttttgtgccttaaagttgagggggcctcttcaacgactaaatgcacattagtaccacttagcccaaacccactgattcccgcgcagtaaggacgctgaccttgacgtggccacggctcacaagaagaagagacacgtatcggcagctcttctgtagatctacacaatggattcaactgttggaagtgagccgtagggaaaatctgaccagtgcggaattgagctataatacgaacaagccccgccaacccagccataccacttaaatgtccaaaattactttttacagaagagatgacacaagactcctgttgcacgtcataagcggcaaatgtatcgactaaaccttgtacttctatcggatcaccaattttagtgcccgtaccatgagcttctatgtaaccaatatcagtagctgtgacccctgcttgatgccatgctgccgtaatcacctcggtttgtgcgatgctgctaggtgcagtgataccattgctacggccaccgtcatgattaatcgcactccctcgtatgacagcatggataacatcatgatcttgatgtgcacgactcaaccgtttaagcagaacaaaaccgcctccttccccaaatccagcaccatcagccattgcatcgaaaggacggcatcgatctgtcattgactcaacccctaacccacttgagttcttactactctgaggcaaggtacctaaaacaagttcacagcctcctaccagagcaaaatcagcctcccctgtcagaatcttgttccgtgcttcgtgaagtgcgaccaaaaatgatgaacatcccgtatctatggcataaactgggccacgcagatcaagcagatacgcaatgcgacccgccgaaaaagcatgcaagctgccgatgaaagcgaacggattggcttttccctgtaccgataacgactgaaaaagatctggatgcggcccgccgtgcgcagcaacaagtactgctgtacgcgcatcagataactctttcagagtgtatcccgcattgacaatcgcttctgtagccagttgaagccctatacgttgtctgggatcgatatattcggcttcacttagtgcaataccaaaataacggtgatcgaacccggtaatttcatcaagccatcccccctctttctcattgcctgtaagaatttgccccgtattagccacccgactttcaggtattgggcgaatgcagtcccgaccgtcagccaaaatatcaatcaattcacgccaatttgagcattgtggtaaccgaaaagagacgccaattatggcgaccgcatcatctgaatatagtgtcgtcacaactgtaccaccttagttttattgggagctgtactctcgccaccgagcactttggctaaggactcaatggatggatatttaaatagttgggcaacagtgagatttggaaaatgacgacgtaatcgcccaaaaaccactaacgacttgaatgagtcacctcccgactccaggaatttagcctgcatatcaatatcatcacgcttaagcacttcacgccaaatatctaagataagcttttctatgtcattacaaggaacggtaacatcagaagaaatcgattcaacagtattaacagaagcctgcaaacgcgctatatcaagctttccattagcattaacaaggatttcatcaatgttgtagattctggatggaatatgactggccggtaatcgggtagctaagtttgaaagtagttcattctctctcgcagtacccacaacataagcaaccagttcatcaatctggtgaaactcagattttacactggtaacaacaacctgcttaatcccaggttcagcaagcaaggcattctcaatctctttaggctggattcgatatccacggattttgagctggcgatccacgcgcccgataaataaatagttgccttgctcgttttgtttaaccaaatcaccactggcataaaacctacgtccaaagatatcaacaaagtgagtttctgtcagatcttgatccccatgatagcctctggccagcgcacgccctcctatatataattgccccacttccccgggggaaactggtcgcctggcgtcgtccaatacagctatttcaacaccatttaagggcttaccgattggaattgagtcattgcctaggcgtgttccatttagctgatgcattaatacaccaatagtcgtttccgaagggccatagtgattaaatattctcagattggggtttgctgcaaataaagttttagcaagtgccgaagttagttcttccccaccaataataagtactttttcaggtaataattccgaaaggttaccttctctggataacatctctaattgcgaaggcgtgcatttcaacatttcaattgaaaatttactgatatgcttagcaagcgcgattgagtccagcatcatttctcgattgataagctcaagagtacgacctgttagcagagcaacgaaaatagacgtattaccaagatccgaagcaaaagttgttgtactcgccaaactggagggtattggtgatacacgctcaacaaatgccgagacgtaattcatgatactgctgtgttcaattgcaacaagtttgggaattcctgttgaaccggaagttgataccaaataagccaaatcaccggctttgcgacctgataccggaatatattcctgtggatctaatatttgtctatcaagattaatgtaagaatggtgttcaatacgtcggcagttcaaatcatcagttaatactgtaaccccgcctgcacgctctattaattcattaattctactgtcgggttcgctgacctctaactgaatatatgcagcgccaacggcccagatagccaatgcagctacaagacttgtagcagatctttccataaaaattgccacaacatcaccatttaccactccttgtgaaatgagtaattgagcaatggcaccagccttccctgccaattctttataagtaagtgcaatgttgtcatggcgtacagcatataatgaatctgaagtggttactgaattggcaaaaagatctgcacaagttcttgattctgtcaaagtgtcccatgtttgcatctcatgtcctcatttggcaggaaaaaattgcaatgcattggtgaagccatgatcacatagactttgcgtgctccactaaacggttccctgccatgggcaacagcaaggttgtcaacaaccgccacatcaccgttcttccaatccgggtacactgtctccgcatcaatagcggctcgaatttcaattaatgtggatgcgctgataagagtaccgtcgccatatttcgccattcgtggaaatatccccacaccgagtgcagcttccaaagcaagctgaacttcttcaggcaaactggaaggatggaacagattcgcttgattaaaccagctttcttccccagtgtaaggatgagtcacaacaccttgtacaacctgtcgtgtgattaactgctcttcatctaaccactcaaagtcaacaccttcagatctgagtttctcttcaactattctcctttcctcagtctgaaatacttgctgccaagttaagtcaaacccagtgttataacgtcgttcatataaaacacctttacttttaaattcttcacgggtttcattcgagagacgttggagcacttttctatagtctgccaatgttgtctgaccaccagaatcagcagctttttgtgaccacagccataaatattttggccaagtacgccggtaagacatttcattatgcaaaggtattcgttgatcagcagggtactctgtagaagtgaacacccgatcattgactttagtacgtggtgttgatggttcttcataatccaatatttcaggagttgcacttaatactgcttctctgaatgcaataacatcttcaatgttgaatccacgaaaaagtaaggcaccatgatcattaagcttttttttacactcgttccagttattactaaaccaggaatacagtgtgatctcactatttggagagcaaatcgtgtaaggtagcatatcatattaatcctatttaaaatggattagctaaactgcctacgtcattcattttccaaagttattaattgagtaaattaccaaaactaaaaagagcagcacgaattcgaaatatctggcactatttcgatactcttaaaatagatttaaaccgtatatccaagtaacttggatatgtatacccgttatctttcaagttgcctctttgttggctgcactcactcaccccggtcacatcgttatctatgctcccggggattcgctcccttgctgtcgcgatgcatctcgaaatccatagggtataggttttagaatttgtaaacggttagtaatcccaaatgctagtgaacgctaacactctggtaaaattacatttagtaaatcgatctattgctattatgaatatcttattacataaatcagaaagactcaatactcccacataattgagatgaataaaattgccgtttgtctcaaatgctttatctttaacttttttataagagtaaatatattcagttaaatagttaataagctgtatgatttgatagattgaaaaactattactgacattattatcagacttatttttcatattttagataatatttgatatgcctaataatggtcgttttataaatttatcatacttgaaaaccatgagtgtactccagttcatattaaagcgttttctcgctgttattttacgaagaaaaccatgataattaaacttaaaaaaataggcgtttctgccctaaaaaagggtaaataaaaaggtgaatggttttaataccgaatttctttcctaaaacatagaagctttttttatctgtttgagttaatagtttcgtttattagagatggttgggataatagaatttaaagcatttgttttatcattttcatacttatattcattcccatcttgtcaggttaaatcacatttgggtgtagggctttgttctattactcagttttaatcattataaaaatccgagcctttaaagggcttaagtctatggtgctatcccatcagagatgattttatccattatgatgcaggaatataatggctgatgcgttgcgcttatccaactttttgctattatgcacccgatgtggcttttttttacacaacgatgttatactcaaatcgtaaacttcgtccattaaataccgatgtgacgacttttgattttaagaatattaaaggaaacttcacgatgacacataaaagatacagcccctcttgggaaagctatatgggcgattttctaagaggtaactctgggattaatcatttgaaacctcaatatcagtcctttgatgctattggtcttgagaaacagttaaacgagaatacaacgtatattgcgttgctatccttagaggaagcgaaagatgttttagaggatattgattcgccaaaaccaaaaagtccatttataaagaaagtgttttcgattaccgatcctatatcaccctatgcaggtaatatacgtgatgcttttgactttgcaaatgtagtaggagaatttaaaaaattaggaattaaagccacagagtatgttggtaaaaatgggcaaagatatattaaaatctcaggtcatgcggggcttagaaaaatcatcaatgcttcaagatacagtgcttctaacatgaagatgatctctatggggatagggcaacagggaataaatagtagcatagttaagggagttaaattcaatatactattttcctcagcttatcgagcggttgaatacatctttaaggatgaatacacactagctgatttcttaggcaatatttcagtagatctggctaaagcagcagtagcggcttttgcttcttgggttattggaacttttgcagcaactgcatttgctactggtgctagcgtaattgttgtggctggtattatgcttgctattggtattgcaacgacatctatacttgattctatagataaaaattttaaaattagtgaaactataattaatttgatcaaaaaagaattagaaagaaaaccaaaaacaccagaagctaatttcaatcaatttcttcataactgggggaattatggtaaataagaaaaatatcttaccaataatctgtgccattgctatttttattttagcactatcaggtttatttttatctgggggaaacttaatttctttaattaaaatggaagagaaaataatattctcaggtcctgtttttataatatttttctcttttcctttgatttcatatcatatggttttagttattattgtttatataactggtagttatcctaagcatcatgatacctatgttaaatattcagccgcaatagctttttcttcatttattttaagttttcctttatctttttatgtggattataaattaaaaagtgagaattattttgtatgtaaaagaatatcctgggcatcacctaatacctatgtaaaagatattaagctatgtgattaatactattgtatttaatttctttataactggaggggttatgataaataaaaaaaagattatgcatattataggagctttttcttttattattctaacgttatttacttttttttctagcggagaaaatttaatttccttagttaaaatggaagataaaataatattctcaggtcctgtttttatgctattttttgcttttcctttcctttcatactttatagtttctgttattttccttaatataaaaaatcgctggccaaaacatcacgatagttttattaactgttttggggtgattgccattgtttcattctttttaagttttcccctatctttttatgtggattataaattaaaaagtgaaaattatttaatatgtgaaaaaatatcctggaggtcgcctaatacctatgtgaaaaacattaagctatgtgattaatattatcggatttaatttctttataactggaggggttatgataaataaaaaaatattatgcatatcatcggcgcttttgctatttttattttagcactatcaggtttatttttgactggggaaaatctaatttccttaattaaaatggaagagaaaataacattctcaggccctgtttttataatatttttttcttttccttttctttcatactttatagtttctgttattttccttaatataaaaaatcgctggccaaaacatcacgatagttttattaactgttttagggtgatagccattgtttcattctttttaagtttccccctatctttttatgtagattataaattaaaaagtgagaattatttagtatgtgaaagaatatcctggatgtcaccgaatacctatgtaaaagatattaaactatgtgattaacattattgtatttaatttcttcataactgggataattatgaaaaacccctcgtgttgaatttccgtatgctataccataacgacagagttttccgcatgtttttaggcgatgtacacacgggacatccagaccatttttgcccgtgtcgaaaaacacttgtttaccgactaccttggggcaactgaatgaagaaccgcaacatcactgtgcatggctctattgtgaccattaccacccgtcatgatcaggactacatctcattgaccgatatggtcaggagctttggggacgagagtatcctctataactggctgcgtaaccgcaatactatcgagtttctgggaatatgggagcagctctacaacccagccaattttaaacctctcgaattcgagaggtttaaaagccaggcaggtttgaacagtttttcactatcacccaaaaaatggatcgatgctaccggtgccattggcctgtacgccaaatcaggccggggtggcggcacttatgcccaccgcgatatcgctttcgagtttggttcctggctgagtgcagaattcaagctgtacctgatccgtgagttccagcggctcaaggaagaagaagcccgggttaactcattagaatggaatttccaacgcaccctagccaaggtaaattaccgcattcacacggatgccatcaaagaaagactgatccctccgcaactgaccaaaacgcaaactgccattatttatgccagcgaagctgatttgctcaacgtggctttattcggtcagacagcggctcaatggcgacaaaacaacggcaatcaatccggtaacatgcgtgaccatgcaacacttgagcaactggttgtgttgtccaatctggagagcatcaatgcggttctaattcatcaggaactacccgcaccggaacgtctgggtcagttgaatacgatcgccattactcagatgcgctctctagttggtctgtcagatgtcaaacagttgggaaagggttcacaacaattacctgatccctcatcgacacagtaaagagattgaaacctgaaagaaaacgggcaactgcccgttgagtctggaaataggtgtgaacacaattctgatccatattcactaagtgacagctgatgacaagactattggatctgccccaataatctatgctcttgctatttttattttatcgccatgaactttctttttggcaagagaaaatttaatttctttaattaaaatagaagataaaataacattctcagatcctgtttttataatatttttttctttccctttgatctcatatcatatgattttatctattcttgttaatataactggtcattatcctaagcatcatgatacctttgttaaatattcagccgtgatagctttttcttcatttattttaagctttactctatctttttatgtggattataaattaaaaagcgagaattatttagtatgtaaaagaataacctgcacacaccaaattaaacttactttacactattttaatcggtccggtttacgaaatatggcctgatactaaaatcaatgacgacaacctgataactctttgggctgtttgctatccatctcccccctaatactaaaagctcgctttgctctcaattagcattcaggaaggagaattccgccgatttgttaaactcagataatccgatgtttctctaattgaacctgccgcgcagcttcacgcgccatacgttttttacgggcatcacaaggttctgggcaatcacatactttttccaccccaatactgcttaaaccaccgcagctcccttgtatgctcttacgtttaatcatatagcctaacgacattcccgcaaaagccagcaggaaaaagacgaaggcagcaataaatactttcagcatttccttccgcttctcattgatttttctgtaggtatggctcaaaggctttactgtaacgctcttcaaaaccatttttcgtttttataatcataaaaaccgggatattcaaattttccgcaacttccattcctttttccggccctaaaacattcaatccagtagaaagcccatcagcactcatacaaactggagcaatcaccgtaatagagactaaattatgagaaatagggttccccgtttttggatcaatggtatgtgaatagcgcacgccattttgttcaaagtaattacggtaatcacccgaagtcgctatcgacatattcccaggcattatcacttcctgagcattttgtgccatgccagtgtcagatggcttttcaatcgcaatccgccacagcagatctttaccattatgacctgatgtacgaacttcaccgccaatgtcaaccatatagtctttgatattctgtgattccagatattcagcaacaacatctacgccataacctttagcgatagatgataaatcgatatacagctctggaacggttttaatcaggttattaccttctaccaccagtttatcaatcccagtccattcacggcgtttttccagttcactcgcagaaggtgctttcgtcacgtgcccttcgggaccaaacccccataaattaaccaatgggccaaccgtcacatccaatgcgccatcggtcaatttattaatgtagatcgcttctttaaccactttggctgtcgcaggtgataccgggaatggccgatcaatttggcgactttgattaaaacgacttaattcagaatcagggcgatatgtcgacatctgaccgttaacctcctccagcaagcgatcaatctctttttgcagagcttctggcgaaggagccgatgaacccgtgacaaatttaatggaatagtaagtccccattgtttgcccatgaatatttttctgctccagaccatcgcatgccgccagcagcaatactgcaaatattaacgctatccagctacttatctttttacgcacagttaattactctttccgaattgttagcgcccacaaatttgtgggcgccggtcattaaaatcaaactatttatggtgtatcagccgccaaaatcatctaacatgatgttttcatcctcaacaccgagatctttcaacattttgatcaccgcggcattcataaccggaggcccacacatgtaaaactcacaatcttcaggagccggatgatccctcaaataattctcatacagaacattatggataaaaccagtgtaaccatcccagttgtcttcaggcagtgcatctgatagggctacgttccaggtaaagttttcattttcagccgctagctgatcgaaatcctctgtatagaacatttcacgtttagaacgagcaccataccagaagctaatcttacgtttggaattcaatcgattaagctgatcaaagatatgagaacgcattggtgccatacctgcgccaccaccgatgaagatcatttccgcatcagtatcttttgcgaaaaattcaccgaacggacccgaaatagtcactttatcaccgggttttagtgaccaaatataagaagacataattcccggaggtgcttccgaattttttggcggcggcgtcgcaatacgaacgttaagcatgataattccgtgttcttctggatagtttgccattgagtaagcacgaactgttggctctttcacctcagagacaaaacggaacaaattaaatttatcccagtcctcacggtattctttcggcacatcataatcctcgtaacgagcaatatgtggctgagcttcaatctgaatatagccacctgcgcggaaaggtacaacgtccccatcagggatcttcaattttagctctttaatgaaagttgctttgttatcgttggagataacttcacattcccatttcttaacaccgaatatctcttccggtaacttaattttcaggttctgttttacattgacctgacaagccagacgacacccctcttttgcttcacgcttactaatgtgagaaagctctgttggcagaatgtcaccaccaccatctttaatctttacgcggcactgaccacaagagccaccaccaccacaagcagaagagacaaaaatcccctggcttgacaacatatttagcaatttatcaccggcaggagcggtaaagctcttttccggatcaccattaacttcaaccctaatatttccagtgttaactaactttgattttgcgaacaaaatcagcgccgtcagtaccaacacaattagggtaaacatcactacgcctaaaattattatatccatgaacgcttctcgcctttataactggacaccagagaaggacataaaacccaatgccatcaaacccgtagtgacaaaggtgatccccaatcctttcagacccgctggaacatcagcatatttcattttttcacggatagaagccagcagaacaattgccaacatccaacctatacctgagccaaaaccatacacgatggattcagaaaagttatagtcacgctgcgccatgaaagagacaccaccaaaaatcgcacagttaaccgtaatcagtggtaaaaaaatgccaagcgcgttatagagtgaagggaaataacgatcaaggatcatttcaagaatctgcactaatgcagcaatcacgccaataaatgtaataaagttcagaaagctgagatcaaccccttcaaccaatgcaccgtcacgcaataccaagttatacaccaggttattagcaggaaccgagatccctaaaaccaccgtgacggcaatacccagaccaaacgctgttgtgacatttttcgatacggccaaaaaggtgcacataccgaggaagaaagccaacgccatgttctcaataaagacagcgcggacaaacaggcttataaaatgttccatgttgtcagttactccttctcaacctgcgccggtttcaacgtcctcagaccccaaatcagcataccaataatgaaaaacgcgcttggggctaacaggaacaaaccattaggttgataccagccaccattctgtaccgattccatcacggtaatcccaaacagtttgccggaaccaaacaactcacgcaggaaaccaaccaataccagaataaccccgtaacctaaaccattaccgataccatccataaagctctcaatgggtggagacttcatcgcataggcttccgcacgtcccatcacgatacagttagtaatgataagaccaacaaataccgacaactgcttggaaatctcataagcataagcctgtaaaatctgatctaccacgataaccagtgatgcaataatagccatctggacaatgatccgcacactgccggggatgtaatgacgaatcaacgagataaaaaagctggaaaaggcagtcaccaatgttaccgctattgtcatgaccaacgccgtttccagcttggttgttaccgccagcgctgagcaaatccccaaaacctgcaatgcaatcgggttattatccaagagtggcccaagaaggactcgttttatttctttactatcagccatctttcaacgctccttcgcgtacttttttcaggaacggaccaaaaccgttatcccctaaccagaaattaaacatattctggacaccggcagaggtgagagtcgcaccagacaaaccatcaacaccataagagtcatcggcagcggcaccgccacgaacaattttaatcgccgggttgccttcatcgttatacagttttttacctatccactttttacgccactgcgggttatccacttctccccccaaccccggcgtttcgccatgcgaataataagtgataccgcgagccgttttgccgtccacatcaacggagataaaagcatacataacagaccacaagccagaaccatagataggcagaacgatttcacgagttttaccctgttcattcttcaccagatagacctcggccatattggcgcgacggcgaattttcgccagatccttttcaggtggtaatgcaatactggtatcatcactgcgcaacgcatcgttcaggttaaacttgccctgactgctttcaagcgttgccgtctccagattcaataactcagttttaatgcgtcttttgaacgcttctttaacctcatcggcactcatctgtggattaagtaaccccgcaacatcgaggatattacgctgtttatccagcaatttttgttcctgttgctgagatttcagccctaccgcagaacctgctaccacaattgagcaaacgagacatagcacaaaaacaacgataaatgttctgccgatgctgtcattattttttggtttatcattagccacgggcttttctccgcttaatattggcctgcactaccagataatcaaacaatggcgcaaacaggtttgcgaacagaatcgccagcatcataccttccgggtatgccgggttaacaaccctgatcagaacgcacattacaccaatcagaacgccgtaccaccatttacctttatcggtaaatgaagcagacactggatcggtcgccataaaaatcataccaaaagcaaaaccacccagaaccatatgccaataccacggcatagcaaacaacgggttagtctctgaaccgatagcattaaataggtaggaagttgcaaccatacccaacatcaccccggcgacaatgcgccatgaagcaatgcgggtaaacaggataattgccccaccgatgaaaatcatcagcgtagatacttctccgatagaaccaggaatattaccaatgaaagcatccatccaggtaacaggctgaccggtaacggtattcactaatccctgactaccaccagccgcccattgagataacggggtcgcaccagagaaaccatcagccgcagtccataccaaatcacctgaaatctgtgcagggtaagcaaagaatagaaaagcacggccagccagtgccgggttcaggaagttacgacctgtaccaccgaagacttctttcgcaatgacaacaccgaatgtaatacccagcgccgcctgccacagaggaatcgttggtggaacaatcaacgcaaataaaatagaagtaacgaaaaatccttcgttaatttcatgcttacggataagggcaaacagcacttcccagaagccacccaccacaaatacaacgatgtaaacaggcaaaaagtaagttgcaccaagcaacattttactgccccaacccgcatccggtgtcagtgatgcccccaaaaactgagcaacgcaatagtgccagtcagataccaaaagttgttgtaattctgcgccactgtataaatgatacaacgcagggatcgcctgctgaccaacgttatacattccccagaacattgccgggaatacggccagccataccatgatcatcatacgctttagatcgatagcatcacggacatgggcaccgccagaagttactgtacctggtgtatagaaaatcgtcgttaccgcttcatacaacggataatatttttctaatttgcccccgagctcaaagtggtgctcaattttttcaaaatagtttttcaggcccatgaaatcatccttcctgctcaatcttagtcagcacttcacgcagtaccggaccatattcatatttgccaggacagacataggtacaaagcgctaagtcttcctcatctaactccagacaacccagtgcctgagcactatcggtatcacccgccagcagatcccgcagcaaatgcgttgccataatatccaaaggcataacacgctcatagttaccaattggtaccatagaacgttcaccaccattcattgtggttgaaaaagcaaagcgcttatttttcaggaaatgaccaatggtggtgcgggtgatagaaaatttatcgatgcccggcatgatccaaccaaatagctctttttcgcgaccttcacgcaaaacggaaaccaaagtgtggaaacgaccaagatagtgatgaacctcatctgactgagtaccgcacaatacggaacctgaaataatacggttttcaccctgtttaagctgaccctgagttaactcaagcagatcggcccctaagcaagtacgtatgagacggggtttctcaacctgtggaccggccaatgcaatgacacgatcagtataaagtgtaccggtagtgaataatttaccgatcgcaatcacatcctgatatcccaggtgccataccgttttagtcgcactgacgggttcaataaagtgaatatgagttccagctaatcccgcagggtgcggaccagagaactgattataagtgatttgtgcattattaccgacattcggcaagcttcctgcactatggcaaacatggactttaccttcggtcagtttagtcagtacattcagaccatcaacaaaagcctctttatcggtagcaataatcacctgtgaatttgcagccagaggctgagtatccatcgcggttacaaaaattgcttttggcgaggagccgggagcaggacttcggctgtaaggacgggtacgtagtgcagtccataacccggaatcaatcagattcttttccacttgttctcgggataattgagtaaattgggcacgatcataacggtcaaaattaacctgttcgtctcccgttatctcaatcacaattgactgcaaaatacgttgttcaccacgattaatcgctacaacctgcccacaggctgggctggtgaaaaccacacctggattctttttatcttcaaaaagaatctggcccttcttaacatgctcaccttccttcaccaacatagaaggacgcattccaacatactcttcacccaacagtgctacatggcgaatcgtcggaccgtcttctattacttgagcaggcgctcctgcaatcgggaggtcgagtccttttttaattttaatcataagatttgcacaagtttatcaattaaatcatatgctacagattacctggtggtaatatagccactctataaaaaaccccttaagtcacgaatcgtgcccaggttataattctccgataattgttacgattttctgttaatctccgggcggcaattttaacatctcccttcttagactgtctgactaatcaagtgatttagttcaagcaaacaggaataattttggcattgaacgattaaccgatcgcaaaaaacgaatgattatatcacctttaccgacaactgattgtattttaacctaacaatcactttgtagtgataaagttaccgtcatcattttctattcacaaagtcgatgactcatggcaatcttaagctaaatttttagttagttcgcgacatcgctattacggtagtcacatgaaaaaaattgcggcttttcctgcaataattacaataatattgttgttatttagttcatttactcctgtctatactcaggatactttagtgcaattgcagcaaaatttccctgtgcagcctggctctcctgtctttatccaaatattcaaagaagagcggatattggagctttatactaaaaatagtcatggaagctaccaactgtctaaaagctaccccatctgtaattactctggcggccttggtcccaaaaccacagaaggtgatctgaaaagcccggaaggcttctatcgtgtaaaaacccatcaacttaatccaaatagtcggtattaccgatctattaatctcggctttccaaatgaatacgataaattcagaggctattccggcaactatttaatgatccacggagagtgtaaatctgtcggttgctatgcgatgactaatggttatatggatgagatctaccattatgtagaaagtgcattattgcgcgggcaatatgaaattaatatcagtatttatccattcagaatgacaccacagaatatgctacgccatcgttcatcctcccactatatgttttggttacaattacagccggcttatgaatattttgcaaaaaatcaccagccagcaacggtcagcatcattaacggccaatatgtggttaatgctacacctgaaaaatcaccacttttgcagcatcaatcacaatatgcgttcaccaagatgaaatagtgcatagcgacccggctcaatacgattccaagcttcattacccgttaaaggttgagtaacaatgacagaaacaacatcatccggctgtgtatgttgttgaaaatcaatttcaatatcttgatccagaagtttcgcttttccaaacggcgcccgacgggtaatccaataaaggttggttgaacaatatgccatcataaaacgcccatctgacaacaacatattaaatacgccttttttgctgagctcatctgctagtgaagcgataaaacgaaaaaccttaggccaattggagggggttcttgggtatttttgtgaaagttgctgcaaaatccagcaaaaagcatgttcgctatcagtttgcccaacgggacgatactgacccgtttcaagctgccgatagccccgaagctgcccattatgggcataagtccagttgcgcccccacatctcacggatgaaaggatgagtattttccaacgtaacattaccgcgattagcctgccggatatgagaaaccaccactctagatttaatcggatactcttgtacaaagcgggcaacgggtgaattgtaacttggttgatgatctttaaatgtgcgacagccccgcccctcataaaaagtgatcccccaaccatctttatggggcccagtatgaccacctcgctgaatcaagccacctaaactaaagcagatatctgttggcacatttgcactcatgccaagtaactcacacattgcccacctctgtagcctgtatacccgtcatctttcaagttgcctctttgttggctgcactcactcaccccggtcacatcgttacctatgctcccggggattcgctcccttgccgtcgcgatccatcttgaaatccatagggtataaaatcaagctttaaccatctctttttcaataagttgaatcaggatatgaataactttgatatgaatttcctgaatacgatctgcataaccaaaatgcgggacacgaatttccacatcagcggttcctgccattttaccgccatccttgcctgtcaacgtaatgactttcatgccttttaagcgggcagcttcaactgctttgataatattaccggaattaccggaagtagagatacccagtaatacatcgccctctttccctaccgcttctatataacgagaaaaaacaaattcatacccgaaatcattactgacgcaggaaagatgactgacatcagaaatcgcaatcgctggatagccaggacgattctcgcggtaacgacctgttaattcttcggcaaaatgcatcgcatcacaatgcgaacccccattaccgcaggacagtaccttgccacccactttaaatgaatcagccagcaatactgctgctttttgaattgcttcaatatttgcatcgtcacttaaaaactttgccagcgtatccgcggcttcgttcaattcactacggatcaagtcttgatacataggctcctcacttcggtcaggtaatctttaatgttgtgccggatggcagtttaccggatcaagagaattgaaagaagacaacatcacatttctggagaattaatccgttcctgatcactgcgagtttgtgagctacattgtaattaagatgtaaagatattgctaaaagcaatttcctggtctaaaaagagaagaacaccacaacaggtccgacctctgatgacttacctgaccctgagattaaccaggagcttttattatgaccacattgagtattattctattcttagtcttgattgggatactttgctatcacaaagtcaatctcagtctcagcagcctactgctccttgtctataccgtcctgatgggcgctattgatgcatggagctactggatgttgttaccaatggccattattctgttcccgctgaattttgcgccaatgcgccactccttactgactgttccggccttaaaagccttccgtaaagtaatgccaagtctatctcgcacggaaaaagaagctcttgatgcaggaactacctggtgggaaggcgagctgttccgcggtaaacccgactggaaaaaattgcatgactatccaaggcctcagctaaccgctgaagaacaagcatttctggatggcccggtagaagaagcttgccgcatgaccaatgatttccagataagccatgaacttgctgatttaccacctgagttatggcgttacctgaaagaacaccgcttctttgccatgatcattaaaaaagagtatggcggtctggaattctcagcctatgcacaggcacgagtcctgcaaaaattggcgggggcatccggcattttggcaatcaccgtaggtgtacctaactctctcggcccaggtgaattgttacagcattatggcaccgaagagcagaaaaaccgctatctacccgggcttgcccgtggtgaagagatcccatgtttcgcactgaccagcccggaagctggctctgatgccggatcaatcccagatacaggcgtagtctgtatgggagaatggcaaggtgaacaaattctcggtatgcgcctgacctggaacaaacgttatatcacacttgcacctatcgccaccgtactcggtctggctttcaaactgtccgaccctgaccatttattgggtgatacagaagaattgggcattacctgtgcattgatcccgaccaatgtaccaggagtagaaattggtcatcgccatttcccactgaatattccattccagaatggcccgactcgcggtaaagatatctttgttccgatcgactatattattggcgggccaaaaatggccggacaaggctggcgtatgctggttgagtgtctgtctgttggccgcggtatcactctgccatcaaatgcaaccggcggtttgaaaagcgttgcgatggcaattggtgcatactcttatatccgccgccaatttaaaatgccaattggtaaaatggaagggattgaagaaccactagcacgcattgccggtaacacctatttgatggatgccgcttcaacacttgcaacaaccggtatcatgctaggtgaaaaaccctctgtgttatccgctatcgtgaaatatcactgtactcaccgaggccaacgctcaattattgacgcaatggatattgccggtggtaaaggtatctgccttggtccatccaacttccttgctcgcgcttatcaaggtgcacctatcgccattaccgttgaaggtgccaatattctgacccgtaacatgattatctacggtcagggagctatccgctgccatccttatgtacttgacgaaatggccgcggttgaaaataaccgtattaaagattttgataaggcactgtttagccaccttggtcacgttgctagtaacacgttacgcagcttctggcttggcttaaccaatggccgcaccagcagcacaccggtcaatgatgcaacacgccgttactatcagcaattaaaccgcctgagcaccaaccttgcgctattatcagatgtggcaatgggggtattaggtggtagcctgaaacgccgtgaacgtgtctccgcccgtcttggagatgttttgagtcaaacctatctggcttccgcgacattaaaacgctatgaagatgaaggtcgtcaaaaagaagatttgccgctagttcagtgggccgttcaagatagtttgtatcaggcagaacaggcgatagataacttactgagtaacttcccgaatcgtctggttgccggtctgatgcgtgttattgtcttccctctagggcgtgtacactcagcaccatctgaccatctggatcacaaactggcccagatcttacagcaaccttcggctacccgtgatcgcattggccgaggtcaatatctgacaccaaacgagcacaatcctcacggattattggaagaagcgctgcacgatattattgccgcagaaccgatccacgcccgtttgagtcgcgaagcaggtaagcgtcttggctttactcgcctggataaactggcagaacaggcactcgcagaacgtaagatcacgccagacgaggccgcaattctaaaacgtgcggaagcaagccgtctgcgttctattaatgtcgatgagtttgaaccagaagcgctggctgttcctgcccgcgttgaaaaactgagaacagaagccgcctgaaactgacgactaaagagagttaagcactaaattaatcacggggcgatatcttaacaaatatcgccccatattttatgacgtagaggcacaagatacttcttccaatgctaacaactcttcaatcgtttgacggcgacgaattaattgaggcttaccattaacaaacaacacttcagagataagcggacggctattgtaattggaagacattgacgcaccataggcaccagtgtcatgaaaaactaaatagtcgccaacttgaacaggtggcaatgctcttggcgcaattccaccgccctcaacctgcgtaaagatatcaccggattcacataacggccccgcaactaacgtttcccgcaatggcaattgctcaatcttacgtccatcagcaggcaaaaccgagatatggtgataactgccatacattactggacgcattaagtcattgaaccccgcatccaccagaacataattacggttccccatctgcttaaccgcccgaacttctgtcatcaaaacgccagattccgcaaccaaaaaacgccccggttcaatttccaactcaattttatgacccaaatgctgctcaattcttttacgagcatcatcccacaacccaaaataatgagcgatattgattcgttcatctccctgatgataaggagtcgataaacctccaccggctgaaattgcctgaatatcttcaccacaaagaataacctgttcaaccatcgcattacatacactggcaaggtgatgataatcaacaccagagccaatatgcatatgtaaaccaagcaatttcaatccatagtggcggattttttcaattgcctgaggaagattctggtaccaaataccatgtttactgttttcacccccggtattcgtcttctggctatgaccatgaccaaacccaggattaatccgcaaccacaccggatgcccttttttatattgaccaatctgttccaacatatcgatagaacccgcattaaccggaatatccaattcggttactctttgcagcgtcgacacatcgattaaatcagcagtgaaaatgatatctgacacttcttgccctggacaaaacccggcccgtaaagcacgttcaatttcccctagcgaaacggcatcaactttcacaccatactcacgcatcaggcgtaaaatgtgagtattagaacacgctttctgagcaaacctgaccacatcaaattgacataacaaattgattttttggataattgtttcactatcgtaaacccataatggagtaccatacgtttctggcagacgacccaaactctccggtatcagattaggacaattattacgggtaaaattgggagtaaaagtagtactcatcagggtttctctcacaaagtcagcagataacccattattggcagtaaaaaacaggaataaaaatatccatttcgttatagtctattcatctgtgatatagaattatcctttgaaggaacaaacaatttatgccttcttgttcatggcgccatattgaaatcttccatgcagtaatgacgacaaaaaatctgacagaagcggctattttattacaaacatcacaaccaaccgtcagtcgtgaattagcacgattcgagcatctaataaaattcaaactatttgaccgagtaaaaggccgcctgcatccgacagcacaaggattacgcctttttgaagaagttcagcgctcttattatggactcgaaagaataatgaatgcggctgacaatatacgtaaatttcaacatgctcagctttccattgcctgcctgccagtattttctcaatcactattaccgaaagtttgccatcacttcatccgtcaatatcctgagactaatttaacaatcattccacaggaatcaccgctactggaagagtggctttcagctcaacgccatgatctgggtttgacagaacatttgcagacaccaccgggtacacagagagaaacactgatcacgctgaatgaaatttgcgtattgcccgctgctcaccctctcagtcataagccgctattgactccagaagatttcagcgaacaaaatttcatcagcctttcaataacggatagctaccgtcagctcattgatggaatattcgcagaacaccatattcgccgtcgcatgattatggaaactcacagtgctgcatcagtatgtgcaatggtgcgcgaaggcattggtatttcgattgtcaacccactgaccgtactcgattatctagagagtcacggcaaatctgaaatatgcgctcgcccatttagtattaacattccttttactgtcagcctgataaaacccattcaccgcccttcttctgccccagttgatacttttattgaacacctaaaagcacaaattgctctgtttcctcagaaactaaagtcagcttttcagcattagggcttgccagtacggagaagaagcaaaccattgaaccagaaaatccagtaatgccctcagcgttgctggcatattttgacggctggcataaataccataaattcccatcgcttgaggtcgatattctggcaacaactgaatcaattttcctgacgccaaatgcgaagcaacagaataataaggttgcatagcgattcccgcaccttgcaatgttgcttccattaacaccatcgattcattggcactcaaagtaccgctaacaggaacagaatatttttcccctcgatgttcaaataaccaaagacttttaccaaaaaagttataagtcatacagttatgcaaggctaaatccgcaggcttttgcgggagcatttttcccgccagataacaaggggcggcacaaaccacagaatgacatgtcgataacggtctggcgatcaaattgggttccagattattcgtgatgcgtaacgctaaatctatccgctcctcgaccaaatttattgccttattgcttatttgcatatcaatcgctatctgaggataaatctgcataaactcaggaatcgccacagacaacgcgcttactgccagagattgagaactgcttatccgcaaaagaccactcagctcctgcgcttctactggttgatgaactggtatctcttccgacaattgcaataacttacgactgcgctgataggcgatctctcctgctgatgtcaggctgatctttctcgttgtacgatgtaacagacgtacccccgcccatttttccatttcagccaaataacgggataccattgcccgcgacatatctaaccgttccgatgcagcaatcatgctgccttgttctacaattatagtgaacacttgcgcagcagtgattctatccatcaattagctcgatttatgcaacaaataattacccattatgcggtttttccatcgaaaaacgcaacttattatgaacctcgttcacacaacatcaggaattcaatcatgactcgcaaaacaacactcaatattgcgctggcaggtatcctttccttgggtaccatttctctggcacaagccgctgatctcaaactggatgtttataatccgggtgagaaaagcctatttcccgtctcttctgaaatcatcagtggagataaagaagttgtcctgatcgatgctcagtttcaaaaaaatgatgctgaagcactggtcaaaagaattaaagataccggcaaaaagctgacaaccatttatatcagtcagtccgatcctgatttctatttcggccttgaagtactgaccaaagcattccctgatgccaaagtcattgcatcaccagaaacaattaaagaaatcaacaagaccaaagatggcaaactggcttattggggaggtgtcctgaaagaacaggcacccaaaaaagtcatcgtgccgcaaccactggaaggtcactcttttacagttgatggtgaaaaactgatcgtcgaaggtcttgatggcccagcggctgatcgtacttttgtttggataccaaaactaaaatcggtagtaggtggcgtcaccgtttcaagcaacattcatgtctggatggcggatacacagactaaagagtcgcgtaaaaactggatgcagacactagatcgtataaaagagctgaaaccgacaattgtggttccggggcatttcattggtaacacaccaatgacgttggaatccgttcatttcacgcaaaaatatctgaccatttttgagaaagagctggcaaaagcgaaagattcaaaagcgctaatcgccgcaatggaaaaacactatccaaaacttggagacaaatccagtctcgaattaagtgctaaggtgctgaaaggcgaaatgaagtggccccaataagtaaattaactctttttcaggaataagtaatatgcccggaatgactctgcattatatctatgatccactatgtggctggtgttatggcgtttcctctctgatacaagccgcaaaagaggtcgcaaatgtgaaaattgaattgcatggcggcggaatgctgacaggtgataatagacgtcaaatagacaacacatggcgtgattatgtccttagtcaggataaacggatcgcaagccttaccgggcaaattttcagtgagcaatatgtcgcactgttaaatgataaatcactgattatggattcattaccaccaatatcagccattcttgcagcagaaaaattggctggtaaaggtgtcgaaatgttactagcagtacaaaaagcgcattatgttcgtggattaaaaatcagcgaaactgaaacattattgaatttagcaaatgaactacagcttgattcagaacagttccagcaggagctgatattgaataatgaatcagaaagtctccaacatattaggaaaagccgtgaattattggcaaaagttggcggctcaggtttccctacatttattttagaaaatgacagaaatgagctatctattatttctcttgataaatacttgggacaacctaaacgttggcaagatgcgctgattcattatcaattttaatcccacagttctaataccacaattttaactactggtgcccatacgttttcagctatcgggcaccatccacgatatcccatccattcccaataaattcaaatagatcattatgaccgcagaaatggctatatatgggccaaaagcaacaggctcttggcaattttctcgtattctccacatccataagcacccaataagaccaaacagtgaggataagagcattaataaaggaattgcaccaatccccaaccaagcactaaccgccgccattaacttaaaatcaccatatcctaacccttctttatgacaaattattctaaataaccaatagagcgaccataaaatcaaataacccacaatcgcacctgtcacagcttgttcaataggcacaaaagtttgattcaaattcaataataatcctaaccataacagtggataatttattatgtctggcaataacttaatttttatatcaataaaagacaatataattaacacccaaacaaatatcaaaacaacatataaatggaaatttaatgaaaaataaatcataaagaaagctgttataaacagtgtcactaattcaacctgaaaataaccaaaaactattttttcatagccataaataattttaataaatacggctatcactttattcaaaatcattcctgatactattccaatacaaatagctaaaacaataaccttaatattaaaatccatttaataaaacatctccaataaataaaaaaacaaatattcattatgtttttggcataaaaagataataataaacaccactacattaaaacaacaaaataaatataaaatagtcaaataagatataaatatgcgagcagactcgcaacatttattcagagataacaatctgcatcgagatagcttgataattggattaagcctcctttatcatacccaccattatttattgctttatgtatacccgcaggaaggaaagaaaaacatgcgtataccccgcgtatatcacccggaattactctcatcgaatactgaaatttatctgagtgatgaggcggctaaccatgttgggcgggtactcagaatgagccacggtcagcagttgcaactgtttgatggcagcaatcagattttcaacgctcagattaccgaagctagcaaaaaatctgtcaaagtacatatcagcaatagcgaacttgccgataatgaatcaccacttaatctccatctggggcaagtcatatcccgcggtgagaaaatggaattcaccattcaaaaatctgtagaattaggggtaaatgttattacgcctttaatttctgaacgctgtggtgtaaagctggatggagaacggctggctaaaaagcttcaacagtggcagaaaattgctattgctgcctgtgagcaatgctgtcgtaaccgtgtccctgaaattcgcccagtgatgcaacttgagcactggtgtgcagaaaatgatggcagtttaaaattaaatctacatccacgagccagccaaagcatcaataccctgcctttacctgtagaaaaagtgcgtttactgatcggcccggaagggggattatcgatagatgaaattgctatgacagctaattaccaatttactgatatcctattaggaccacgggtactgagaacagaaacgacagcgctcaccgcaattactgcattacaagtgcgtttcggcgatttgggttaaggagaaagaatgatcaaactcggcatcgtgatggaccccatttcatccatcaacatcaagaaagacaccagttttgccatgctattagaagcacaacgtcgcagctgggaactccattatatggagatgagtgatctttatctgcaccaaggggaagcccgcgcacgtacccgcttattgcaggtagaaaaccatccacaacaatggtatcaattcgatagagaacaagatctggcactggaaacattggatgtcatcctgatgcgtaaagatccaccatttgataccgaatacatttacgccacttatattttagaacgcgcggaagagaaaggcactctcattgtcaataaaccacaaagcctacgcgattgtaacgaaaaactcttcacagcctggttccctgaattaacaccagatacattagtgactcgcaatgccgctcacttacgtgaatttcaccagaaacatggtgatgtcatctttaaaccactagatggtatgggcggtgcatcgatattccgcctgaaaaaagatgacccaaacgtcggggttattattgaaaccctgacggaacatggcaatcgcttctgcatggcacagaatttcttaccggccatcaaagaaggtgataagcgggtattaattgtcgatggcgaacccgttccttattgcctggctcgtatcccagcccaaggtgaaacccgtggtaatcttgctgcgggtggccgtggtgaagctcgcccgctttcagaaagtgactgggctatcgccagagctgttgctccaacgttgcaagaaaaagggttaatctttgttggcctggacatcattggtgacaaactgactgaaattaatgtcaccagtccaacctgtgcacgcgagatagaagccgctttccctgatatttcaattactggcatgttaatgaatgcaattgaagaacgattagagaaataaaaaattctttttacgaatttgcctgtcaaggtttgtcatttatacttttagcccacatactgttgggctaaataatccttacatagccaggttaattactagaaaaaaaatgaatctacagcaccattttcttatcgccatgccttcattatctgatccctatttcaaacgctcagttgtttacatatgtgaacacaatgcaaatggggcaatgggattggtgataaataaacctattgagcaaatctccgttcggaaagttttacaaaagctgaaaatatcaccagaagatcgggatgaaagtgtcaatctaaacaagcctgtcatgactggtggcccacttgctgaagatcatggttttatattgcacacaccaaaacccggtttcagttcaagtatcaaaatttccgatgacacaatgatcaccacctccaaagatgtccttgaaaccttgggtacaccacgccaaccaaaacagatattggtcacgttggggtataccagttgggaaaaaggccaacttgaaaaagagataatggagaatagttggctaacaacaaacgctgatccacacattattttcaactcacctattgcggaccgctggcgtgaagccgcatctttgctcggaatcaatatctataatattgcgccacaggcgggacatgcatagatgaataatcgtacaataatggccttcgattttggcacccgcagcatcggcgcagctattggacaagaaatcacgggcaccgccagagcattaacctcgtttaaagccacagatggtatccccaattgggggcaaatcgaaaaattacttaaagaatggcaacccgatctggttatcgttggtcttcccctcaatatggatggcactgagcaattcgtcacagtgcaagcacgtaaatttgcaaaccggctacatggccggtttggcgtacaagtgcaactccaagatgaacgcctgacaacggttgaagcccgtgctcatctgtttgaccgaggtggttataaggctttaaataaaggaaaagtagatgctacttccgctgttattattctggaaagctggtttgaacagcgctattaatagcaatcaaccaacagtaacagcaatcaattaacagcaaccatataaccgcgattaactgatagcattttctttaatcttcctttccgtttgctctgccagtaatccctgcaatttacgctgctgccagccttgttcataggtttgcatcccactggcagcgcccgtctgcataagcgttgttatttgatgattttttccttctcgtatcagatgactcactgcctgattaactaccaatacttcatatatagcaactcgtccccctccctgggcagagactaattgctgtgctatcacagctttcaggctgcctgctagctggctacgtacccaccctttttcttcagcggaaaaaatatccaccagccggtcaattgcctgtacagcacctcgggtatgcaaagtcgacaataccaaatgcccagtctctgccgcggttaacgccaagcgtattgtctctttatcccgcagctcacccaacaacaatacatcaggatcttgccggagagccccttttaacgcagcctgataactgggagaatccaacccaatttgccgttgttgtatcaaacaattgcgactatggtggataaattccacaggatcttccaatgtaataatgtgctgacaacagtggctgttcagcatatccacaatggcagttaacgttgtcgactttccgctgcctgtagcgccggttaccaagatcaacccactctcttcccgcaaagccatttcacggataatttcaggtgcttttagctgttccagagttgaacactgagagtgaattaaacgcaaaacggctgacaacccggagtgctgacgaaagatgttgcctctcaatcgttggccattttctgtttccaacgcaaaatccacatgtccactagttaatagctgttgtcgctgattttctgataaaaactgcctactccactcttccagcaatagattatttacagattgcagttgagtttgcggacaaagcactccatttatacgtaatacaggaacttgcccaatacaaagatgcagatctgaagcattatgctttacactaagggccactagcttatccatattcattttttaatctcctgagtcaccatgaacaatattgaacaaaatttacaagatgtcaggacccacatagccattgccgcacagaaatgcgaacgcgctccagaagaaattaccttgcttgcagtcagtaaaaccaaacctgtggaagatatcgaaaaagcaatcgctgccgggcaacgccagtttggtgaaaattatgtgcaggaaggtgtagaaaaaattgcttattttgcaaattgtaatgatttgatatggcactttatcggtccgttacagtctaataaaagccgtttggtggcagaaaattttaactggtgccataccatagaccgcttaaaaatagcacaacgcctgaacgaacaacgcccggagggaatggaaccgctgaatattcttattcaaataaatatcagtgatgaacggagcaaatcaggtattcaacttgatgaactatcaacgctggcagccgaaatgaacaaactgccgaatgtaaggctccgtggtttaatggcaatcccggcaccagaacctgactatgcacatcaattagcggttttcaggagaatggaacaagccttccttaacctgaaaacgaaatatccccaaatagatactctttcaatggggatgactgatgatatggctgccgctattaattgtggttccacattagtacgaattggaacagcaattttcggtgcacgtcagtatcacaattaaccatttcaatgctacgaggtattcaatggagagacgtaaaattaccttgattggtgcaggtaatatggctcacgccatcatagctggattagtaaaaggagggtaccctgctgagctgattaatgtctgcgcaccaagtcatactcgccgtgatgcactcgcaacagagtatggcgttaacagcggtagtgacaatattcgctacgcacaggaagcggacgttgttgttctggcggtaaaaccgcaagtgatggtagatgtctgccagcctctgaaagaaaatgtagatttcagtaacaagctggttctgtctattgcctcaggtatttccgttgcacgttttgatgctttattacaagacaaactcaatattgttcgtatcatgccaaacacgccggcattaattggtcaaggggtgagtggattattcgcatctgagcaagtcagtcagtctgaccgtgatttcactcaagcattaatgaacagtgttggtaaaacttactgggtaaaagatgaaaacggcatcaatgacgttatcgccgcagcaggcagtgcgcccgcttatttcttcctatttatggaatcaatgcaacaggaagcagaacgtttaggttttgataaccaaacagcccgtgaaattattttgcaaacggcaataggttctgcggcactggccgcatcaaatgtagatctcccttttgcaaccctgcgtgaacaggtaacatctaaaggcggtactactgcggaagcattacgtattttttatgaaggcaaattaccggaaaccatatccaacgcgatgcaggcggctattcgccgggcacaggaaatggaaaaacaattttaattttatcaaggctgctaaatgcaatttttaacctttattctgttcacagttctggatttatacatcgctgttttattacttcgtgtatggatgcaatgggcccgttgtgatttttataacccatttgcccaatttattgtgaaaatgacccaaccgatcattcggccattgcgccgagtgataccatctattggttcgctcgatactgcctccattgttatcgcttacgttctggtattgtttaaattaatcatgcaactttggttcagtaccggtacggttgctttcctcacacttttcatccctatcgggttaatcgaattgctaacagcaacaggtaaactggtattttggttagtgctggcacgcgctctactaagctggataagccaagggcgcaatccgattgactatgttctgatgcaactaacagagccattgatggcacctatccgccgtattatcccaacaatgggcggccttgatttttcagcaatgatcgtcattttgatcctctacgcattgaactatcttcgcgctgatgttctctcatggctgatacagtaaataagaattaaattgggttcaaaataatgcaaaaagtcgttctggcaaccggcaaccccggaaaagttcgtgaactggcacaattactggctgattttggtctggatattgttgctcaaactgagttaggcgtagattcagccgaagagaccgggctgacatttattgaaaatgccattcttaaagctcgccacgccgcacaagttaccggcctgcccgcaattgctgatgattctggcctatccgtagacatccttggtggagctccgggtatctattcagctcgctatgcaggagaaaatgccactgaccagcaaaatttggaaaaattgctggatacgatgaaagatattcctgacgatcaacgtcaagctcagtttaactgtgtgctggtttatatacgccatgcagaagatccaacacctctggtatttcatggccgctggccggggttcatcgcacataaatctgccggtaatggtgggttcggttatgatcccatcttttacataccggaattaggctgtactgcggctgaattaactggtgaacaaaaaaatgctgtttcacatcgtggtcaggcactaaagatgatgttggatacactacgtaatgcttaagctcccaccactaagtctttatatccatattccgtggtgtgtacaaaagtgcccttactgtgatttcaactctcatgccttgaaaggtgatgttccacaccaagagtatgttgaccatttattggcagatctgaaaacggatctgccaatggtcaatggtcgggaagttaccactatctttattggtggtggaacccctagcctgcttagctcacaagcaatgcaacaattgctggatggtgtccgtgccctcctgccggtatcgccacaagctgaaattactatggaagccaatccgggtactgtggaagccgaccgctttagtggttatcagcaagcgggtattaaccgaatatccattggcgtgcaaagtttcagtccagataaactggtacgccttggccgtattcacggaccggatgaagccaaacgggcagcacatttagccgctagtctggggctacgcagttttaatctggatttgatgcatggtttgccgaaccaaagccttgatgaagcgctagatgatttacgtcaggcaatcgagttatcaccaccgcatctttcatggtatcagttgactattgaacctaataccagctttggttcccgccctccggttctgcccgacgatgatgcgttgtgggatattttttcacaaggtcaccaattgctgacagcagcgggttatcagcaatacgaaacttctgcttatgccaaaccaggttaccaatgccagcataatctcaactactggcgctttggcgattaccttggtattggctgcggtgctcatggaaaaatcacatttgaagatggccgtattctgcgtacagtgaaaaccaaacatccccgtggatatatgcaggggcgctatctggataaacagcatcaggtagaaaatgaagatcggccatttgaattttttatgaaccgattccgtttactagaagcaatgccaaaacaagatttcagtgatttcaccgggttatctgaaacctcaattcgtactcaaattaaacaagccttagccgcaggttatctctctgaaacagcaacacactggcaaattacgcagaaaggcaaactgttcctaaattcattattggaactatttctctagcacaaaaattgcttttggaaaattcagtttcacaacggttatctttacataaaattgataccgccattggttttggtgctattcataatcattccccctactgaacttcagtgggggtactcattagacaatagcaactgattgtccagtgttgaattccttctcttttcggagggctgattatccctcccaatttaaataaaatataaattacaaattacaaattacaaattacaaattacaaattacaaattaaccaaggtattaatattaaaataataatccatattttaattttcaataacagaaaatcaatatttataaaagaaaatcaacaaataatagtgtaaaaacaaatgaaaaattcacaaatctctcctgtaaatatacttaccatgtagataatagttaatgtcgatcattaataagtgtattaattaataatttaataaaaacacgttctacacaatattaattttaacatatgtgaattacgacacaataatatcatttaaattatctcaaatacgactatatttaatttgtgtttggttatatttatattaacaagcacgaacatttaaaaaaaatttttaatttcactttgcttggagtaaaaaatgaatattgaaaataaagaaatgttatataccttgtccaaagaagacctcgccacagaactaactccgtattatcaagatttttatgatcaactttccgatcatcaaaaggaaaatattagctttgacatggttgtaaatgatgcttacaagagattacattttaataactcagagccaactgacactgatggaagattaaaattaatagagtacgcaggtgaatctccatgcattcatgcaattggtatagttgtcgcagatgcttttaaacttgcatttaaattcatgggcatacataaacctgaaagagaatcagccacacagatattattgaaaaaattaggtcatgatgctatacatgagctacttactatagttcataaccttaagaattcgaattctattactgataaatcaaagcatacctggtcattaatttccgcagttgaaagtattttaggtatttctggaataactgattgcttaaaagagacaatgcattggtacaattggatgattactggaataactgcaatcgcacaattaaccatatggtttgctacaggtggagctgcatttattgcagaaatagcactggcgggtcctgctatagccagattagcccttgactctgtagacgcggctaatacttgttcataaaacctttatctgtaatctcatttaattatcaaggaacttattatttattataagttcctttcaatataagtatcattacccatattataaactcgaataaatcagacgctaaaatgtaaaataaataataatttcaccttgtaaaaccaatatataaattactattaatatttttaaataattattttttcacagaaagaaaattaccatccgaaaaaatatttagatcaattcctgttatttaaaaatgaccaatttaaataattttatagcttacttacatatgaaataaatatatttattaataacaatattagttttcacactatatatcatgacacattaacattatattttatgaataaataaagcattatttcgaatataaaaattatctatattttcgctggaaatacgcataataagctaattattcatatacccgttatctttcaagttgcctctttgttggctgcactcactcacctaggtcacatagttaccctatgctcccggggattcgctcccttgtcgtcgcgatccatcttgaaatccatagggtatagctcagaccaaacctgacagccaccagcataaaataaccgataactgtcagaccaaatctaaaacaatccattgtgaaacttcaacaactattcaaattcaaaatggcgcatgacctgattaaagggcatcagctacagcattaacttgtgctgacaggctctccaaaccaccgccagacaaataccacagatcagacttcagataagtaattttgccattcttgtacgctgaagtagatttcactttatcatcttcaaacttcgctttatctagcttaccagcaccaattgcttcactgcggtcaataattaaaattacatctggattagcttgagcaatcatgtcagaagtcactacaacgcgtttggttttatcttcaccagcaggaatagctaattccgctttctgtgccttaaccacgtcatacacgacactctggttattcagcattagtttatctgcgttatgtaacaatactaaaacttttgcatcagcagatttagctttatcctgagctttaacaatggttttctccaactcaacaatttggtctttcacttcactctgtttactaaataattcacctaataatgttatgttactttcaaccgaaaccagataatttttgctatcagttcccaaattaattgtcggtgctatttttgacagattttcatagaaagaaccttgacggccggtaataacgatcaaatcaggtttaagctgcgccagtttttccagattaggctctttcattcctcctgcattttctacctctttaggtaagctattacggagatattcaggcgtattacctgtaggtaatgccacaaccctatctgataaacctaatttaactaatgaatcataagtgccgaaatcaaatgaaacaactttctgaggattttttttgacctcagtttcaccggaaaggtgcttaactataaccttatcatcagcctgagctgtaacaacatttggtgtaaatacagcagatttctgactaaatgcggaatggcttgcaacagcaaataacgataccagaacgacagggatgatctttttcatatattgcactccaagaaagaatatttagtaagcatttgcattctaggtagcgaaaaaaatatgtcaatctaaataagaatcaatttcaaattgattcttatttgtgattattagcaactatttaatagaattcagtaattcaattcgttgttgctcaaggccactgaccttaccgcaaacctctttgccaaaacgctggaaatcttcctcctgagtccgccattcagctttcaaattattctgcaatccccccaaactaccaagcaaagattgtagtgcctgattattatcaccattcaggctaaattgtttattgccaatctcattaatactgtcctgtaatactccaccaagactttgctcaattaagctacggctatctttttcaaccagcttaatcgcttgatggtggaatgccataccatcagaacgagtttcaataattcggtttatttgctgattaagccctgactcaagatcggacaaccgatgacgcacattgctatccttgccgatagtctctactactactttatccaaggatttacgcgccgttatcagatgttttccggtttcttgtttaatccaaggcaaatcctgccgcaaagcccgctgatatcgctgtgctttctgacgctgttctgtatttaaacttaagttcttaccatcacgaattactgaaccatcaggtgaaatctggagattgccacttgcccccacaacttgaactgattgagaagtaataataatgtcattctgtggatttacctggcattcataaccagcttgagtctgagcaacaaatagcaaagatgcagcaatgataattttgcgtaacatgttttctcctaagaaaatcacctgagaattaaaaaatggattgagagttaaaaaacggatcgcccaacacgatcagctaacaattctagggcagcacaaccggccaaagagttccccgatcgatccaattccggtgaccaaacagtaacagtaaactctcccggcacgacacacacgatcccaccaccaacgcccgattttcctggcataccaatcctgaatgcaaattcaccggaaccatcatacataccacaggtcatcatcagtgcattaatctgccgggcctgacgaggactaaggatttgctgctcagaacctatcgtactcccttgattcgccaaataaatgaaacatttagcaagctcaatacagttcattttcaaagcgcaataatgaaaataagtttgcagtaccgcgagcacatcgttatcgaaattaccgaaggatttcatcagataggcaatcgctgcattgcggtgagaatgttccatttcagaacgggcaactttgctgtcgtaacaaatatcaggacaaccagcaagtttgcgcaccacttccagcatacgctgtttaggtgcactcaatcgcgactgcaacatgtcacagacaattaatgcacccgcgttaacaaaagggttacggggtttgcctttttccagttccaactgaactaatgagttaaatggctgaccagaaggttcctgcccgacccgctgccagatctcttgttcctgataacgtgtcatggctaaagtcagacttaatattttagaaatagattgaatcgaaaaacgcttctcagcatctcctgcatgaaatatctgcccatcaatagtacagatagctattgccaagttatcagcaggaacctccgccagtgcaggaatataatttgccactttcccttggccaatcaggggacgaacttgtcgcaaaatatccgacaataacgtattagagaacgttgtactcactgattttactccagacaggggcactaattaatcaccagctacccctgttgtgattcatgcaagatattttatagattaatcaatcccaccaaacatcaaacaattcagaggtcatgacatcttccataccgcgatctttcagccatttttcaaccaattggcggtgttcttctgtacacataccaattttttgcaaacagattaagccttcccaatccagataaccgctggcatccaatgctaagccattggattcaatcagctcatcaataaatgcatcaacagtgctatcgataacatctatcggtgtattagacgggaaattccacttaacagaaaaacccaactctttaaattcatcaatatgcatctttttacgcaaacgacgactgcggtttttagccattacttaatcctcttaaacatgatgtcccatacgccatgccccaaccgctgaccgcgcaattcaaatttcgttatcgggcgtgaagatggacgcggcacataatcaccattttcggacaaattaaggtaattatctacgccattcatcacttccaacatatgctcagcatatggctgccagtcagtcgccatatggaatacgccccctactttcaacttgctttttatcagttccgcaaatggtggctgtacaatcctgcgtttattatgacgtactttatgccacggatccggaaagaaaagctggaccatttccaaacgattatccgggatcatgttttccagcacttcaatcgcatcatggcacatcacccgcaagttaccgatattttcatcttcagcggaagccagacaagcaccgacaccaggcacatgaacttcaattccaagaaagtctttttctggattctgacttgccattgtgacaagtgatgcccccataccaaagccaatttccagcaccacaggggcttctcgcccaaaaagtgctcccagctccagtttttctgcctgatactcaacacctatttttggccagagattatcaagcgcttgttgctgacgattagttaaccggccctgacgacgaacaaaactcctaacacggcgcaacgccctgccattttcatcaaattccggcgaaattacgttatttatcatggtatttctgtcagttttaaaggcatttattcagccgttcatggctgctttaccagcaaaccacctatccccgtcatctttcaagttgcctatttttgttggctgcattcactcaccccggtcacatcgttatccatgctcccgggggttcgttcccttgccgtcgcaatgcatcttgaaatccatagggtataaaagagagcgcattatccaaagatgggcgattttagcaagtccgatagtgataagtacaattttaatactaaattgcgtagcactgcgaaaacaaagttccggtttacagcgaggttacactatgttgcaatcctattcacgaaacactgattttccctaaagacaattatccaaatgatggaagcaaagcaattctccacagtggtactggattggtaccatcgttacggtcgtaaaaccctgccttggcaattggaaaagacctcttaccacgtctggctttcagaagtgatgttgcaacaaactcaggttgcgacggtcattccctattttcagcgctttatttcacgttttcccgatataacttcacttgccgcagccccccttgatgaagtccttcatttatggaccggccttggttactacgctcgcgctcgtaatttacataaagcagcacagcaggttgtggagcggcaccaaggtaaattcccgacaacttttgaagatgttgtcgccctacctggcgttggtcgttcgacagcaggtgcaatcctttcactttctcaaggtaaacatttcccaattcttgatggcaacgttaaacgggtattggcccgctgttatgccgtggaaggttggccgggtaaaaaagaggttgaaagctgcctctggcaaatcagcaccaatgtaacgccagcgcaagaggtagaatattttaatcaggcgatgatggacttaggcgcaatggtttgcactcgcagcaagccgaaatgtgaaatctgcccattaaatcaaggatgtatcgcttacgctaaccatagctggacaaaatatcccggtaaaaaacctaaacagagcattcctgaaaaaacagcttatttcttgctgatgcaaaataatgattctgtctggctagaacagcgcccaccaacggggatctggggtggtttgtttgcgtttcctcagtttgagagcatggatttactaaatggctggttagaacaatcaggcatttctcacagtaaacacgaacaactcaccgcattccgccacacatttagccattttcatctagatattgtgccgataaaaataaatattttatctttcactacctgcatggatgaaaataaaggactttggtataacttacagcaacccgcaactgttgggctggcagcaccagttgaatatctattacaacaactgggctgaatcccctacccactattttgaggatttattatgaacagaactgttttttgtactttcttacaacgcgaagccgaagggctggattttcagctttatccgggcgaattgggcaaacgcattttcaatgaaatttccaaagaagcgtggagacaatggatgagcaaacaaaccatgctgatcaatgagaaaaaactcagcaccatgaacccggaagatcgtaaattgcttgaacaggaaatgactaaattcctgttcgaaggtcatgatattcaaattgatggatataccccaccagaaaaataatatttagctttcatcagagcccgtggctctgatgttgtattcaacaccagatggcaatgtaagatgaaaaaactgttagcgttgtttgttattgccccaattcttatttcctgtaccagcaacaaaaatagtgaataccgcgaagaatatataaaagataccaatggttttgatattttgatgggccagtttgctcataacattgagaacatttgggggttgcatgaagtattaattgcaggcccgaaggattacgttaaatataccgatcaataccggacccgcagccatatcaattttgaagctggaacgatcacaattgaaacaatttctccaattgaccctacaacctatttacgcaaggccattatcacgaccttattaatgggtgatgatccaggttcagttgatctttattctgatactaacgatattcagatcagtaaagaacctttcctttatggacaagttatggacaataatggccaaccgattcgttgggaatggcgagcaacacactttgcagattatctgattgccaataaattacaaaaacgccaatccggtttacatgtcatttggtctgtcactatacaactggtaccaaaccatttggacaaacgtgctcataaatatctgccactgattcgtcaagcttccattaaatatggcatagacgaatccctgattttggccattatgcaaatagaatccagcttcaacccctatgcagtcagccgttctgatgcacttggattgatgcaagttgtacaacatactgctggccgtgatgtttttaaaatgaaaggtaaatcagggcaaccgagccgtagttatctatttgatccagaaaataacatcgatgccggcactgcatatttatcgatattacaaaacagttatctggttgacatcactaatgcaacatctcgccgctacgcagtaataacggcttacaacggtggtgcaggtagtgtattacgggtattttccagcgataagaaaaaagcggctcaaattattaataaaatggctccgggtgatgtttatgaaaccctgacaaccaaacatccatcggcagaatcacgtcgttatctgatgaaagtcaatactgcccagaaaggctatcatcattaagacattaaaatattaagaaaataacggagagcaacttttctactctccgttattattttgcttatatttctagctaatcgaataatttcaaagcataaatcactatttccaaagaaatctattgacgggctctaccgaatacggtttaatgcgccccgttgcccggatagctcagtcggtagagcagaggattgaaaatcctcgtgtcggtggttcgattccgcctccgggcaccattcaaagtgcgcttgttgggagataaaaacttaacgggcgaccaatacaagaacccgaatgtatgactttggctagtttagcttttcagtatttcgatattgaactgaacataagggttaccaagctaggatgcctaagaacttaggtgtccttttcgtgctttaatgcaatacttacaagttctattgcagctgtcaagccatccaaaccaaaatcaatgaattaattaacacgatgttgtatgttggttactcaactttcctcattgatcagaagaaatttaattatgagtgattgtatcagctcaaaaaaattccctatcttgcgacagggaatgatttatgtagaaaaagacagactcaggcaacagcgggaatattctgttttatctgattaatacttcgcctctctctggttcaacatcgatataaagcattaattcacgctccagcgcacgcccggcaatatccagattgatatcaatatattccatcgtcgtggcaatactgcgatggcccagtaatccgcgcaccatttgcaaattacgatcaggcgctttcatcagttcagttgccaaagtatgccggaaacggtgggggcccacatcaaatccacactcctttgacaaacgacgaaagaatgactttatcgtctgtaattgatcagtttcacttcctctgtctgttttggcggtaaaatagttcacacagaacaggggatcactgggttttgccccagcggcttgcgcacgttccagcaaaatctccagccgcggatacaaccatttcaccaccggcacctggtgttcataatggttcttactcccctcagagcaaagaataatccggcgctcatccaggtcaatatccccgagccggatatgtaataactgattttgccgcatcccggtataacgcaacgtatccaataccgtcagccagtaccaggtcggatataatgcacagcgggcacgatgattatcccctgtccgtcgttcccgctcttcaaattgccccatcgtgagatacaaggttgtcagttgttttttggtcaatgttttctttttatttttgttctcattaacctctacaccaataaatgggttttccgtttggggcagtattttttcttctatcgccaaattaaacactgaccgcatatgcgcaatcttactgttccaggtcacgcctttcagtccgcgctgatgcaatacatatctgcgccacgccaggacctgctgtcgggttacctgagcaggccgattgtcggcacctgcaaacacctggaatgtattcaccaccttgcgataactcgactcagtagccggtcgcaagattttggcaaaaaaatattcatccagcaggttatcccaggtcatactgtccatctctacttcctcacttcatcaatttaaaaacccattgcggggcgcgaaaaataacgcatggttattataacacattgttattaaagatactttctcaggaaatcattagaaaagggctatcctcgggtacaggactaccacggtaaagcaaagtacttttgattaagtagccatgaacacgttgataggagccaatccgatcggcagaatcataaagatgacaacaacaaaaacactttccactacttattcgatgtcgtcccagccgctcaaatgcggtttgtacccgtttccatttttggctaacctctttgccatcagcctgttttttctcactaagaaactgaaagaaaatagccggcgcactcacaaacacaaagccgccaaccaaatgtatccgggctttcggcgtattaatactcatacccccatgcattaagccaacggacaaccagtcccagaactgctctccaatacaggatgtctcaatagcattttcatgattctgccatgttgtctgaacagcgtgttgtgaaggtattgacgtgtatggcggtgcgatttccgcttcactcaccataacttgttctgtgactgtggtgacaacattcatccccattaatgacaatagctgctgcgtgcttccatccggttgcctccccttctccggcgtgactgtcatagcagtaaagagaggctcatcaacagacttcacggctgatgaaacaattttagtcatcgtgttatcttcctgccgtatctgagagggcagaacattttccattgcggttgataaaggcgtagcagaaacatcgggatttcctgaaacaataacttgcggtgatgcagccatgacagataatacttctgatattgtcggtgcaccggctttattcaaagcttctgtcattatctgatttattgcgttatctttcttcatctcaccggatagaatacaaaacagcgaaggcaaggcatcaggtaccgacgccagccaggtcaatgccttagccggcagcaatcgcccggcaagtaacaccccaaaatgacaggcaaccatcgtctccactgaggaagttttgaaccggaaacgatacgccccctgcggcacagccagccctgggtaccaaggttggccttcatccagttcgccctcaaactttgccaaaacaggtaaaaaatgaaataacgcagcgtaaaacaccaccgtgttccatatcacactttgtgctgcctgcgtctcaggtgccacacccggcggtaacatctgccctttcgccagacgtacggcaaatgcagtacattgcaacgtcacatcaattaatccgcccaaacgggcataaggtccctgcggtgccgccggaagttgttgcatcaatgccacacactcatgtaatggggccagccacagcgtctgatagcgtgttttggataatgtgctattgtcccacagacactgtaaatattgtcgtcgccgggaagtatccagcaatagcctggactcagacggcaaaaagtagcctgctttgaccgtttgtgggatggcggcggattgtggaagtggcttttttcctgtggatgctcctgccagcaggattttaatttttttcaacacgattaatctcccctatttttcctaaaaccctaatacatcctctgacagggacaaggcaaaactctttttccgggaataaaaattaatcgatgaaaacagcacgcaatgattcaaacgtttccaattcagtcacgggtaaacgaagcgtgtatccggttatttcgttgaattcgctacgataagtacaaaaggcaagaactttattcaatgatggatcatgcaagaaaggattaaagaggaaaatagaatgtgtccagtgcatctgggaagcactatcgattccgactaaaacacgtcagggatgaacccaataacctcagttggtttattttgcctctccgtcctgttggataaaaactccggcccaagagccggaattggcttaatcaagtgtctcaaaccgtttgaacctcatactgctgacgatttttcctgagacgacaaggccagtttcccagccaatgtaccggagtatacatgacccgatgacgttcattcgtcagggcatcacctatcaccacctccccaggtatccccaatagagaaagctggatataggccatcgaagccgccacgacatcaatatccacacaggatacccacatatgctgagcaggattataacctgacattttcaacacttccgctgccgcaataaccatacaacccgcaccacaagctggctcatataaggtgaaaaagggctgcttcgttaagcgttgctcgacgtcgctcaactgcattttcgccattaccaagctgatgggccagggagtaaagaattgcttcagatgtttgttgccgagattcaattgcataaaaacaccgccaagaaaatcatgaggttcaaattccaatcccatcatgacatgttcaagcagttgagaaaaccggctagcatcttccggcttatagtgtttgatgatttgcagatatccttgctccagcttactgtccgggcagactgcattatgcagactaattgccgcacattgtacaaaatcatcgaatactcggttacgataataataacgggcagtttcattaaacaaggtaataaacgcttttttatgatcaataaaaacagacaaaacatgctcctggaaaacggggaacatgtcccactaagggatatattccccttgtgggtaaatcgccggcgtaatatccgccggcagtagcgttatcagacactcaggcaaacctgagttttttatgtcaattcaccccaaggaatttccctacggaataacactgtcagtgcactaacatccgtcatgtgaaatattgccgagaatgtaggccggtcctatcaccttacggacaccgtcttcctcaccaaattccagttcatcaatgctaacctcttccctctgcccattccgatatgtatcgtaaccacaaaaactacgggcacctttaaaataatgggtgatatggcagtgatattgcctggataaaggcgctatgattttttcataccacggctccctgggtgttttgtcaaaatgcccggtcagactgccatcatcattgtgcttccaggctatgtcataacctcgcggctgcgccataccgtacaatcggatatacaactcatgagttgtctcgtgatcccttaacaatccgccgcaaaatccattgatttcactcgcaagatgggtcggtatcagcagaaacaagtcacaaggcaccgtctctgtcagccgatcatcaagatgagaccacagcatttccgtgtcacgttctccgttccaatcaaccaaaccgaaccagtcacaggacttttggttaaataaagccatgatggttttctgcgctgtcgggagcaacgtctcccattttcgctcggccagaccactttgttggtatagcctgtcaatctgttggctggtgacttcatcaagcgcaacattctcttttaacaaggccagccattgctcaaacgcccggttttccggtgagtctccccctgttcctttcgctaccagcgccggataaagcaggaaatctgtcgtttcagtcggttgtaggagaccgacacagcccgcgacaaacagcttaatactttgatggatagcctgtccgtaatagggaattctgtctcccaatccccattgtcgcagggcatccagttggtcaggttgacccgtgatatgcaaacgattagcgtaccacttcggcatagtaaaaaatcctctttttttacctgaaacagggcataccctgtggaggtaatgcccccacaggccagtgataagttcagcgatgtgaaaaaaggctatcccgctttcggatagccctatccgaattatttatagccggacagccggtctccacaattttatggcctgtacatcagggcgccttctttttccaaacgccgcgataatcctgcccgtcatcacccggtacaaatcaggccggaaacgcctgccatgacgacgggcgactttgttcttgcggacaatttttggggctgttttggtcttaatctttttcatcagtaacgctccgaaataaaaacgggcattatcccctgaggggaaataacgcccgtcagggtgaaaacaactgccggcagcccggcaatcaggggtaaaattgtgtgataatttgtgtggctgtcagcgtcaccttcagatcacatttgtcattcagtaaccggttgagtgtagatatggagaaacccagcttttccgcaaaatcatcgccgcccgcttcctcccgggcacgttcataccagccttcgtccttctccggatgataaccgcaagcataagcgacaagatatttgccgttttgcatcgaaccgatatcagacatgatataaatgccctgatccttgaccagcaacacgtcacactgatgggctatcgcttcccgcaacacaggtttcagatctttagccttaaaaagtaacatcgtcattctcctgaggagaaacgttcccattgagggaacatgtcccccaatgggttaaagtttagttatgccgccagcctctgtactggcgaagacaggctcactgaacgggttttcagcccaaactgctcatctacccatgtgattgcctcatccaccacatcccgataatccttgagtgtcgggttattaacattttcaatgtctacatctgatcgaaaactctctattacacaaccatttttgtataccacatcaacctggaactggactggcgtcatgagtccatcagagacctcatcgatatagtcttcgagataccctgactcaaattcctctgcgtcaatattgtgtaaatcctgtggccccatgaagacatcaatgtaaccgacagagaaggaaaaacgccgtatcaaacggggttcaacctgtaagtgacgaagaaattggcccagacgttcaaaacaatacagacacgtttctgtcaactgcttatccaaatagtccataaaacgtgtccagtacttttgtgttttgctgaactgttccagcccaatttgttcatcttccggtagattatcctgcgccgtcagacgcaaaaattcctctgccgttagattcagtaacacggctgtatccggccggataagggtatccacacgaccactgctttccggatgggtataaggcatcagcaacggatcctgataaacatgagatatcgcatccatcccccgtatccataacgtcaggatacgttcactatttctgcatctagcccggtttgccggatcctcagataagctgtccaaaagatgagtcatgacaggcaaaagtaactctttggtaaactttatatgggtattgacgtagtctccctggctttcattaaacagacagaaaatagcgtcgtcatccagctccagccccattcgttctacgaattgatgccggatataaaaacgtaataaagacataagggaaatctcgtgattgacggggttccccctgtaggggatatcccctatcgggttaatgtgatgccacacaatagtgacttgaattaaagatatgtgtcagctggccttgcgcatcgctatttcatcttcagcttcctgacgctgacgtttaaattgccagaatcctaaatggtacattggcgtcaccattttctgagacatgacatgagtgagtgaattgcccaccgtgaccacggccgggacacccagcaacgacagttggatataagtcatcatcgcggcaaccgggtcaatatcgacacaaaacgccaacatctgttgctgaggattaaaccccgcttccagcatggtctgatacatcgcaataatcatcccgccggcgccacaatccggatcagacactgtgatatattcatgctctccggatcccagcctcgccaagccctcagcgagcttcattctggccatcatatgactgaccggaaacggcgtaaaatactggccaacctggtcattacctaattccagcgccatgaaaacagctcccagaaaatcaccggcttcatactccagccccataataacttcactcagcaaacgactcagccggaatgcatcttcacgggaataacgtttaacccgctgcatatagtccgcttcaaattcatcattttgcaacaacgcgttgtacagtgaacaggctgccatatgcacaaaatcacagaacacctgccagcgattttcatgcggcgcaatctggttaaacagtctgataaaagcctgtttatgtggattcggttcccggtaagtggccgccaacggcagttccacaacattatcgtcagacggatcattatcttcatcttcacagctacgatcagacgccaccggcggtaacagcaaccgttcagattgtgatgatctgtccggttcacaagtatcagccggttctgtcgccgggatccgagaatagttcagacacgatggctggctggagaataacgccaatgcctcactggcctgccccaattcttccggaaacaacctgccttctggctggtcacgccgttcccagtgatatattcgggctaaagcactgacagccatcagcggtgtgatgccctcatcaatatggcgctgaaccacctcatcatattccagcatggtgtcattcagcggcagaccatagtgctcactgagcaatacggcagccatctgctgccacaattccacctggcttggtaactgctgtcgccggtcttgcaaataatccattgcacggcgggcatcattagcagcctgaaataaccaccacggatctgagcccaaagcatgttcccgtagtatcgtattatcaggatataccaggttaccccggacacccgtcaatgcagccaaaaacgcggtgcctagtgctgtcacccattgttcccgactttcatcccactcacttcgggctgtcaggccaaaacggtttaaccgggacggatggccagaggcatgaaccagttgatgcaataaatcatgccagtattgtgtactttcggcatagtcctgacagccaggcagttcaatacggtcatgcaacgaccggtaaacgggcacaatgcctgaccgatgaaccaccgggatcccactggccgtcaccagttgctgaacagcggcaaaaccgggagccggacgggggggtaaagggcaacctggttggagctctgccggcagtccttcacattgttccagattaatcacacgcatcagcgacattgaaggccggtaacggacgatggttgtcggtttttcacctttgaccacccatccgcctaacgctcttaaatcatcaccggttaaccagcgattagatatcagctgccgctgcaacatagtttgccagagcaacagcacattgataccgctaaacggttgtccggtcagcgcatgctgcggcaaaccgtactcactggccgcttgccaaggctgctgccagagcacccctccactttccaggctgtctgtaagacgtcgggttattaaccggcagatatcgtccggtaggtaagaaatggtcatcatctttcctgtctaaaattaaggaagagaccattccacagggagtcgtctctcccctggagataaataattagcgcatgaaataatgagctattctggccggtaacgcagtcagctcgtgataaactgctgacaaatcaacctcataagcatgaagaatcaaatatactcccgtcaccagcgacgtcaatgctatcccggtcaacagccaacgacgacgctgcctgagtttcttctcctttagctgaacctgttgatacaggaacagccccagcgtctgcaactcactgaaccggtgaaattcctcacgccgtaaggcttcacatgcctcatcgtaacgctcaagctcggtcggatgatgacgagcaagaaaacaacggtaaccgtgatttctcagggtgtgatagtgattgtcgaattgcgcctgcaaccactgattaaaccggctacgggtttttttgaatatttccggctcagccagcgcctgcacggacagggactgggacggtgaccgaatgtgttctttagtcgtcattgtactcatagggttaactcctttcgtaaaaaaatgactgacggagttaaccctcacgggtttccccgtcagggtaatcaataaaattaggcgtccaacgcaatcagcaaccgatcagattcatgtttaagccgcagcgcttgccataagggggccttcatgtcgccgtcatacggcaaacagaaaaaaccaaacgtcacctcacacgttcccggctttgctgctgaccaggctttgaatgcctggtaaatcagttgatgaaaccgttctgtttcatattccggcgcagacggataactcaccattcgcaaccagactggctcttcaatcgctacagccggcatcacccaccgggtaacggcagtcaacgtctcattgaccattatgcggcctcatcataagcatgcgataaactacgctgtctcaacaggcgcgttagcatctgttgtgccgaatccaccgcttccgtttcgtcgataaggtaccgctcgccataaaacggctctggactctcctcaccgaaatacagcaactccacacccggtttgtagctgtgtctatctctgaccacaaccggtctcccgcatgacttcgcgtcatcagaaagttgccatttacccgcatacaccgtttgtctccgagcctgggtcatatgagtcaccggtagtctcacctgtcttcggcgtaacaaccaggacatcacatggtaaaacgacagagaaatccaacgaataacgccccaaagtactgtcgcaaagatcattaacatcgttcgtctcctttatccccataacaactggaaaaccagcaacagcacacctaacgtcaggatccccgcaactttgaacagcgttatcatgcccaaaagtttaaggagtgcgtcacgatcccgataatcacactcatcacggatcaaatcgcggataagtgagcgttgtttcggcgttaacatctctgaaaccgacaaggttgtcgtatcagtggggggatgaaaagcaggcattaaccactcctgttaccgggagcctgcccttgacggggacaagccccgggaaatgtaaggaagatgttcatcacgaacatcatacaaagtaaataaatccgtcaggtcaatccctgtcaggatgcctgataagtatcgccagccgaggcaatctccccgacttaactttgcgcccaatcagtgcttcagaccggacagatttcatcaatatttcagttaatcacgataaagtttgcataatatttcctcaaatgtaaaaaatgaggaataacctcatccctcagggaaaggcattccccatcaggaagtggttgatatgagagagacaacagagaactaactctgtccctcggaggtgagatcaccaaatggcaagcctgccaccgtgtgttactaaaaatgcaccttcatcactgtaatcagtgatacccgttttcaaaggataaacgggtgtaccgcccaaaggcaccatctctcaggttacaatggttttatgacgagtcacccaaaggcgtcagtctcagactcgtctgacattggccgttgtccgaaaacaacaagttaacacattgatattaagcccagggctgtttcgattcaagctaaattcaaaagccaattaatcatcactgcactgtttattgtagacacgggcaacataatgtcctcgtccatccccatgccctaaatccattgaaaccatcgcttccgcttcttttcgacttaatcctttcgacagatgataatttatggcctcaacagcataagcataacgcaaactgtgtggcgaagactttccggttaaccccgcttccctgacgatattccggtaacgatcaatggccgaatgtaaattcggtttatcaatcaaacgaccctgatttttattggcatactttattgccgtcctgacggcctggatcactttatcccgctcaaccaccgtcgtgtcacggggacgtcctccttttgtaccaaacactaccctcactctttcatccccacgcaataaggctttttcccacgttcttaatgactttgccgcctgaaccgcttcttctgttcgcagtcccagataacgagaaagttgcatagccgcagcgaccccttcatctttcccccgggccaaaacaagcgtcgtgtgataacgctcatccgaaatcgccatcttagtcccctcccggctggtgccggataatccgagcgcatgattacttaaccgttcgtgatgagggttagctaattgagatcttcccgccatagcgaatatcgcccgaacggccgccatctcattttgtaacgtgcgctttgaaatattctctgactttcggctatcgatatatttttcaatatgattaattttcatattcttaatatcacggatttgaatatttaatatcgccatgctttccgccagacgtttggctattttcattctgtctgaaacggttttaaaactgccgccagcctgacgggccaatgtgactaactgtttactcaactttgacatgcaaacgatttcctttttaacccacacgacaccaccgcttgtaacctgacggaggcaggcaatacaaaacggtattctgaatgtcatctctcaaccccaacggcacggtttgatttgcgcttcctgcggctcgactgatatctgtgcatcggggtggcgaaaggttgagttcttacgaggcaccccagctctctgagctgttcgcggtttacaccgtcctgaccgttgtcagactacctccaacgccagttttcactgacgtcgccatcaatatcgaatcgattgttctccttcttctgaatataaaacgtcaacatgattgtttttcactcaagacgttaaggtggattgcgatcttcaaaccctccgaccggggtactacgtattggtcagaaggtagaagatacagggaaagcttgtattacgtggtttaggatgttgtacgctggcagcgtcacttggttttcgttatcacgccaacaagtgacgccgcccatttcttctggacccaatgcgttgtccgcaaaatatccaataacctgtcgaatctgacaacagtcatccagactactgaacgaaaccacccaggcaagccaatcgtagaaagcaaaatcaacccgcaggttattgtttgaggatactggcaagtcagaaaattgcctgtgaaattgcaccttcatcactattgttagtgatacccgttttcaaaggataaacggatttgccgtccgaagacgccatctctcaggctatgatggcattgagatcagtcacccgaaggcgttcctctcagactacgggaacattaacgatcgcttacgcgataacgaatactgccttaaattaatcaaggtctatttcaacgtcaagaaagcttttcataccgcatagaataatcatttactcttttcaaaaaacgagcaaaatgacaggccgaaccgttaacaaaaagcaaaacaggcatagataaatccgcactggcgatctttgtccctaggattcatgattttttccactctgtgaattaatgacgaacacctgcttctgatgattgtctcccaatccgcaatagcctagcgtcagttctgccaattgactgagctaaaagtcatcatctaatcataaaagatcatttcttatcaaaaattaacgaaaaccgtcatatttcaagtgattcaatactgaaatcaatcattataaatgtgacgcatatcacataataaaaataaaacaataaaattaatttgaaattattaatgttgattattaaatgattaatattaatccattttttatacaattctgttacaaaataatcacattggcctgatttttgctttgtcatataacctcttgtttttgctgctatcttaaccaaccccctattttagttgcccggttgataatcaaccctaaatattgatcgctaagttaaattcgtggttaatactgtttcgacattgtggaatagaaagtcaatgaaaagcagtattttagtcttaacggttttttgtagcgtagtctcaggcagtcaagccgccgacatcgcagatcaacaactcattcatcaacaggcccgtcagcaagccctggaggcgcaattagccccgccgcctgcggaggttcacctgtcggtaccggaaaccggggaatcatccgccttcccggtggaaaccccctgttttcctatcacacatgtagcattggcaggtaccgaaaatttcccgcactggttaccgttccggcgtgtcgcccaacagggcgaaaaccattgcctgggcgataaaggcattagccggctgataacccaattgcaagatcagctcattaatcacggctatgtcaccagccgggttctggttcctccccaggatctgcgtacccaaacgctaaaactggtgatgataccgggcaaaatccggcatatccgctatacccctgacagcgggaaatatatccagcggataaccccctttcccgcgcgtgaaggcaagctactggatttacgggacattgagcagggactggaaaacttgcaacgcttcccgaccgtgcaggcggatatgaacattgtcccggcagagcagccgggggagagcgatattgtgctggactggcgtcagtcccggcattggcgaatcgccacgtatctggatgataccggctccaaaagcaccgggcgttatcagggcggactcaccttctttctggacaacccgctggcgttgagtgatctgttttatctctccggtggacgcgatattcattcatctgccgggaagggcagccaaaacgacacgctctattactccctgccgttcggctactggatggcgagcgtgacggccagtcattacgattatacccagacgatagccgggctgaatcaggcgatccaataccggggcaaaagccaaaacctggcggttcagcttagccgtgttctgcaccgtaacgccgaccagaaaaccctgcttaatggtgaaatttatcgccggacgtcgcgcaattttattgataagaccgaagttgatgttcagcgccgggaaaccgcgggctggaagctggggctgtcccatcatcactttatcggcagcgcgacgctggatactagggtgacttaccagcagggcatgcgctggtttggcgcacaaccggcgccggaagagtaccgcaatgaagggaccgccttacctaaaatcacccaattctcggcgacgcttgccgggccgttaaccttgttttctcagcctttttcttatcaaacccagtatttgcgtcagataagcgccagcccattgacgccccaggatcgcttctcgattggcggtcgctggacggtgcgcggctttgatggcgagctgactttatccgctgatcggggctggtacagccgcaacgaactggactggcaaaccccgctgaaagggcagtcgctgtatctggcaatggattatggcgaagtgggcggccggggcagcgacgcgctgctcggaaaacacctggcggggagcgccctaggctggcgcggcagtctgaaaggggtgagctacgacctgtttgtcggcgtcccgctgtccaaacccgccggtttccaaacctctcccgtcacggccggattcaacctgtattggcagtattaattcaaataacaaaactgccggtgggtagtgttgtgtggagtaaaaatcatgaacaagcagttgtatcgtattatctttaatcaatcccgccagatgtggatggtagtggccgagatagcgcgggccggacggggacgaaccgggcgccgatatcggtgcccctcttcaccacagcatcgttgccgactcactgcgctacggtttggattgttgttagcctttggcgggatttcgctcaccgcgcaggcggcgattgtggccgacggacaggcgccggggcgccagcaaccgaccatcattcgcagcgccaacggcacgccgcaggtcaatatccagacgccgggcgccgatggcgtttcccacaatacctaccgtcagtttgacgtggataaacagggagttatcctcaataacagccatcaagccacgcagacgcaactggggggtatggtcgcgggcaatccgtggttagccaaaggggacgccagcgttattcttaacgaagtcaacagtcgttaccccagtcaactcaatggctggattgaagtcgccgggcataaagccgaggtgattattgccaacccggcgggtatcacctgtaacggttgcgggttcattaactcacatcgcaccacgctcactaccgggcaagctctgatggagcgaggccggctgaaagggtttgatgtcaatcagggggaagtgcggattgacgggcacggcatggacagcacacagcaaagttacaccgatattatcgcccgctccgtcgccatcaacgccaaattacacgcgcaagacctgaaagtgaccaccgggcgcaatattgtggatacggcgcatcagcagatagagaaaaaatcgattgacgatgaaaagcacccggcgtttgcgttggatgtggcggcgctgggcggcatgtatgcccataaaatcaggctgataggcaccgaaacgggggtgggcgtgcataatgccggtaatatcggcgcgtctgccggggaggtccatatcaccgccgatggctgggtagagaaccgcggcaccctcagcagccgggatacgttgcaattaacctcgtctgccgatgtcactaacaccggcaaattgctgtcacaatcggcggtgaatttacagaccaaaggagcactgcgcaatcagggccgggtggaagctcgcggcgataccacggtcaacgcaggcacaatacacagcagccatgacagtgtgtgggccgcgggactggatgataacggcaacactacccgtcccggctcactgactctgaccgcgcagcacgttcaggcgaaggggaaaaatctggccgccgatacgctggctgtccacagtcagcggattgacctgagcgacagccagaccgcagccagccagattcaactcaccgccagtcaagcggggatcagtaccgctcgcgctaccgtcaacgccgaccgtttgacggcgaaaacgccgggccagtttaacaacgacggcggccagttagtggcgaaggaaatccacctgacgaccccggatttatccaaccagcaggggaaaattaaccagaccgggaccggtgaactgacgctccatacacgcaccctgaataaccgtgaggggacagtgttcaatcaggggaaattgaccctcactactgaccggcttaacaaccgtcagggcactattgccagtcagggcgaggacctgcatctgaccgcgcatcaggccgataacaaccaggggacggtgcaattggccggtcagggtcgattatcgctcaacacgcaacggtggctgggtgataagggcaagctgctcaccaatggcgccctgacgatacaggccggtgaactgcaactcaaccaggctgaaactcaggccgggcagataaccgtcaacgccgacaccctgagtcatcaaggcggcgtgatgcaacaacagggcaaagataccctgtccctcaccacccggaagctggataaccagcgcggtacccttgcgggcaacggcaacctgaaccttaaagcaacgaccgtcgataatcgtcacggcaacatcgtggccgccgaaaaaggctcgctgacactggcggtcaaagacacgctggacaatcagtcgggccgggtgttaagcggcgggcagttaaccctgcgcaccggcgatgttgataacaccggcgggataatcgccgcggacggtaaaaccacgctgaccagcgccgagctcactaatactcagggccagattgccggcaatggcgggctggacattcacagtcaacaactgataaaccgcgaggggaccttacaatccgccgacgccctgactctggataccgacgggcagttactggataaccagcagggccatattctcggtgagggcaagacgaccatcaccagtggcccgctggacaatcgccacggtcatcttcaaggcggacagttggctatcgatacccgacacgccgcgctggataaccgggacggcaaattgttatccacggacaccttaaccctgaatactcatcagctcgacaatcgtcacgggcaggtgcaggcggtgggcgacaccacgctcaatgttgacactcaaaccgataacaccggcggccttatccgtggcggtcagcaattgaccctgaacaccgctcatttgattaaccgggaaacgaagcagacggataacgggctggaagcgcaaaacctgacggtcaacgctcaacaggtggacaatactcagggcgctttacgggcagccaaccatctgaaagcgaacatcagccagaccttaaataatactcaggggctggtctctgcgggcaaacagctcattctcaaaagcgaggcccggcaaccgcatctggcgattaataaccggcaaggcacgctgattgccggggagcacgccacgattaacgcccatgctctgagcggtgacggccaactgttatcgcagggcgatatggcggtcactttaaccgaggattttcatcataccggcaacaccgcggccaatggcaatctgaccctgaaaacaaccggcaatctcctcaacgaccgccagataaaagccggtcgggcgctgcatcttgacactcacaatctcaccaatagcgcctccggtgaaatcagcgccgggcaaacgcaaatccaggctcacgataccctgagcaacaccggactgattgacggcggtttgactcatctcacggccaacaccctgaacaataccggcaccgggcgcatttacggggaccagctggccctccagacgggcacattgaataacaccgctcaggacggcaaagccgcggtcattgcggcacgggaccggctggacatcggcaccgcaacgctcaataaccagcatcatgcgcagatttacagcgtgggcgacatgcgcatcggcggccagttggataataccctgacggcctccggtcaagcccatgagctcaataaccacgcagcgacgattgaagccgggcgccacttgaagattaatgccgaccagattaacaacaccaacgccgggttggtcactcaggtcgtcgaaacggaaaagtctcagcatcacgatgcagtactcagcggccagaccacccgttacgactggtcacaggtggacacttcccaccgcaataaatacaaagtgcacgatgccatcatgccggatggcagccgcagtaatgacttttacgaatatcagtacacccggaccgtcaaggaaactcaggttaaacagagtgaccccggtaaaattctggccgggggtaatatcacgctcaacagtgcgcaggtcactaatcacgacagccagattgtcgccagcggggcgctggatggagaaatcggcgaactgcacaatattgccactcagggcgaacggattaccaccgataaaggtcgccaaactcactggtacgccaaaaagaccaaacacaaaaagttcgggttcggtggcaccaaaacctcgcaggggaaaagccgcagcaattatgacccggcccccgtaatagaaaccatcgacctgaaaacgctggcctggcaggagaatacccgtccacagggcaccgatatcacgattacagaccgacagaccggtcagatacattctgcccccacggcggttacgccggtgaacggtatcaaaaatcagccactggtattgcccccggagaccgtcaaagggcaaacagtcgatccggtgatacgcgtggtgacacccgatacgcgtttgccgaataacagcctgtataccgtgcaaccgggcagcgacagccactatctggtggagaccgacccgaaattcacccagtacaaacagtggctgggctcggactatatgcggcaacagttaacgcacgacccggcgctggttcacaaacgcctgggcgatgggttctacgaacagcggctggtgcgcgaccaaatcacccaactgaccggtcagcgctatctgccgggctacaacaacgacgaagcgcagtttaaagcgctgatggatgccggtgtcgcctttggcaaacagcaacagttaacgccgggtgtggcgctgagtccggcacagatggcgctgctgacctcagatattatctggctgactaaccaaaccgtgaccctgccggatggcactaccgaggtggtgactgtgccgcaggtttacgcgcgcgtccgtcagggcgacctgagcagtgatggcgccttgctggccgggaataccgtggcgctcaacagtcagggcgatatcaccaacagcggcacgatgagcgggcgtgacgtcactcaactgacggccaacaatttgaccaacagcggctttattcgcggcggcaaagtggatttagcggcccaacagacgctcactaaccggggcggccagattcagggggatgatcgggtgactctgaaaggccgggatatcaccagcgcatcgaccgtgcgcggggatgaagctaaccgctggctggaccgtccggcaggcatctatgtgcagaacgataagggcaccttatcgctgagcgccattaacaatgtccaattaaccgccagtgacgtcaagaatgcgggtaaagacggtcacaccgagataacggcaggccataacctgacgctggacgccttaagcacgcgccgcacagagcaaggcgactgggggaaagataacacccgccgtctgacccaacaacaagatatcggcagccagataaccggcgccggtgaggtgaccctgcaagccgggcaggatttgaacgccaccgccgcccacgtcaacgccggtcaacaactgacggcgcaggccggaaataatctgacgctgaccaccgggacggcctcatccgacttagtggagcacagcaagcaaaccagcaaaggctggctgtcgaaatcgtcagtggaaacccacgatgaagtgcatgaccggcaggcgctcagtaccacattcagtggcgataaagtgactctacaggccggtaaagacctcaatatccgcggcagcaatgtcgccggtacgcaggatgtcagcctgaacgccggtcatcagctcaccgtcaccaccgcagccgaagcgcacgatgaaacccatttgcgacaggagaaaaaatccggcctgatggggaccagcggcatgggtttcaccgttggcaaagccagccagaaagtcaccaccgacagtgacagccagctgagcaaaggcagcacggtcggcagcagccagggcaatgtcacccttaacgcgggagaacagctccgggttcacggcagtgaggtgattgccggtaaagacctgacgctgaccggtcaacaggttgatatcaccagcgcggaaaatcgccatcacaccacgacaaaaaccgaacaaaaacagagcggcttaaccgtggcgctgagtggcgccgcaggcggggccgtcaacagcgcggtgcaaacagccagagccgcccgcactgaaagtgacccgcgagtaaaagccctgcaaaacactaaagccgccctcagcggagtgcaagcggcgcaggctggccgactggcggaggctcagggcagtgacgacaaaggcaataataatctggccggggtgagcctgtcttatggccgccagtcttcccgttcagaacagcagcaccgccaaaccacccaacagggcagccacctcaccgccggggataacctcaccataaccgccaaaggggatggcaaaggcgcatcaggccagaatggcgatatccgtattcagggcagccagttacaggcgggtaaagacctgcaactcaatgcgaatcgggatattcagctctcatccagccagaacaccgagcagacgaccggcaaaaacagcagccacggccgctcgctgggcatgggcctgaccgtgggaccgggaggcaccggtctgaatgtctcggccaatgtcagtcggggcaacggtcgcgaaaacggcaacggcgtcagtcatactaacaccacattacaggcgggacagagcgtcgggctgaacagtggccgggacacgacgctgaaaggcgctcaggtcagcggcgaacagattaccgccgacgtgaaacgtcatttgatcctcagcagcgagcaggacagccagcgctatgacagccaacaacagaatgccagcgcgggcgtcagtgccaccgtgggtcccctcactaacggtaccgcaagcctcaatgccagccgcaataaactgcacagcaactatgacagcgtgcaggagcagaccgggctgtttgctggcaaaggcggctatcaggttaacgtcggtgaccacacccaattggacggcgcggtgatagcgagtcacgctgacaaaaccaaaaacaccctgaacaccgggacgctgggctttaaagatattaaaaatcaagcggattttactgttgagcagcaaagtgcgggcgtcagcctgggccaaccgaccgccggtcaggtcctgaataatctggcggtcaatgggctgagtggttccaataaccagggccatgacagcaccaccacgcacgctgccgtcagtgacggcaacctgattatccgggataaagcgcaccagactcaggatgtcgcgaacttaagtcgcgataccgataatgccgcgaatgtcctgagtccgatatttgataaggaaaaagaacagcaacggctgaaacaggcgcaactgattggcgaactcagcgcccagatgaccgagatagcccgtacggaagggaaaattatcgccaccaaagcggcgaaagcgaagctggaccatatcagtgagccggacaaagcggcagccagaaaaaaattggtcgacagtggcaatccacacccgactgcggcggatattaataagcaagtttatgacaccgcttacacacaggcgctgaatgactcgggctttgggactggcggaacctatcagaaagcgttacaggcagccacggcagccattcagggcttggcagggaacaacctcggtcaggcgctggccgggggcgcttcaccgtatctggccggtgtgataaaagcgctgacgacagatccacaaactcataaagtggatattgccaccaatacgctggcccatgcgattttaggcgcggtaacggcagaggtcagtggcaataatgccttgtcaggcgcagccggtgccgcatcgggtgaactggccgctcaagttctgataaagcaactttacggcgacggcaccaaagtcagtgaattaacggaggagcagaagcaaactatcagcaccctttccaccctggcagcaggattggcaggcggcattgccggtgactccaccgccagtgccctcactggggcgcaggccgggaagaatgcggtggagaataatgcgctggcctcgcgaaatctgggtgattgccgcacgctgtcaccggaagcgtgcggcaaggctaaggagctgagccagcgcattctggataaaggcttgccgtcagtggaggacatgcgcggtaaactggcatcatgtcaggatgacagctgccgtaaaggagtctggacagagtaccggcaggccagtgatgcgaccatcaacagcctgaaacagatggcgttgaatggtgagttgagtcgtgaagaactggcattcatcaaccatgaactgggcaaggagctggccgtctcaggttaccgtgccaatgacaagatagggcgttcagagcagagcagctggttaaatggcggcagcggacccctctccgggttttttaacacggaactgcgtcaaaaagagctggaaaaatcgggcttgtccaaagcggatgcggcgcagtacgtgaaggaagagcagcgcaacctgttgttgctggagactgcggtcggggctattgggggagcagccagtaataagatacaggcgaagccatcatctgtatcatcaaaaaataatgttgataaaagcgttccggcggaagctactcaagtacagcctaaccaaacggctaataaatcaagtacaacaacacagacagatgtcgcaaaatactttggccaggacagaaaatattggtcggctgagccagttccctttaagggaaataaggtttatcaacgaaatgacttgtttgatccaagccgtattgatcctaaatcaggtaagacaaacgtagagcttatgagagctggtagagcacctatcggtaatgatggaaaacctgtcaatttacatcatatgttacaaaagcaggatggacctatagctgaggtaacgcagagttttcataaggataatcataaggtcatacatataaatgataacagtatcccctcaggtattaaccgctcggagtttaataagtggcgttctgattattggaaacaacgagctaacgattttaaatagggttacgtatgaatactaaacttaatgatgttattgaagaaatcgaacgcttatcagatggtcaaagaaatgatgttgatttgccagatgatgaattaatttctcagtatgaaaaagaaattggtttcgaattttcaaatgattataaagaggttttgaaaaaaataagtaatatattctacggaactatagatttgttatctgttacccgtgataaaaaatattatggagaactgtcacaagcgttaagcgatgcaagagagcaagggctacctgaaaatttgctcccgatctgtgaagataatggcagttattattgtattgattatgacggaaaaattaagtactggacgcttgatggttataacgaggaaagttggcctgatcttgctagctggataaagcaagtatggatagaaggtaattagtcatgctaaagatcccagcgcttggctgggatcttttttgagccgtcagttgtactcaacgagccggataatcaactgcccgtgctcaacactgacctgtactggctgtccggtggcaaagcccgcttcttccagccagttgcctttaagatgcaaactggggtgctggctgtaatagcgggtcataccggtgctgcggtcttcgtggcgggtgcgggcataccccaccttatagctgcgccgggcttttgaaatcgctaaatctgcattacaatcgcggttagccataaatcaactcctgcttagttggttgtggttagcggttgtggcaggttgccgcctgctccatccgcgtaaaaaaatcctttctcttagctgtctgtcttttactgttgtgcctgtgcaattaccgcatccagcatctctgaaaccagcttctgcttagcgcggggcaactggctgataatctgtatctgttgctcaagccgtgaagccggtccccgtttacgggggatcgtgtcgctctcttcgccgaacagttcttcgagcgagacggaaagtaactttgctatctcaggcagaacagagatctggatccgtcttctgcccgcttcccatgactgaaccgcttgctgagaaacgttcagtgcctgagccagttgcgcttgtgtaagtccggcgtgtttacgcagggcagaaatccgctgacctaacgtcatcataaatacctgttcttcactactgatggaggcggccatagtcgttgttaccgatgtaaaaagtgactgaatgaccctaatctacaacatgttttacatcttactgttgtaaatactaccagctgtagtatatgattgtcgagttatttttatccaaaccctattgacaggtttttacaggaggtcactgatgacccgcgttcccgataccgatttagcccgcttaaagcaaaccgtctcgttactggggctggcgcgtaagcaaggccgtccgatgaaaaaacgcggtgaggattatgtgctgcgctgtccgttccataacgagaaaacgccctcaatggtgatatcgcctgctaagaacctgtatcactgctttggctgtggcgcagcgggatcggtgctggactgggtgatacaaacggaaggggtgacgctgaaaatcgctatccgccggctgcgggagctggccgggttgccggatatggacaatgcggttgtggccgcttcttctttagccgccccgccgggatcacaggcggcacctctgccgcgcccgaaactggccgacctggacgatgacgggcaggcgctgttgcatcaggtgattgatttttatcatcagcacttactggcgtcaccggaagccaaagcctggctggagcggcgcgggctgaaccatcctgaactggtcagccactttaaactggggtatgcgggccatcacggtatcagcggttccgcggggttgttgccgtccaaagacagtcaggaaggtcagcagttgcgcggcaagctgtcggggctgggcgtgttgcgtaccaccacccggcaggaccacttccggggctgtgtcgtggtgccgataattggctgggccgaatcggccagtgtggccagccgcgggcgggtgctgcaactgtatggccgccgaacccagccggattacaaagtgctgaaagacagcccaaagcatctgtacctgtcctcaccactggccggggtctggaatgaggcagcgatgaaagccgctgcggaaattatcctgtgcgaagcgctgatcgatgctatgaccttctggtgtgccgggttccgcaacgtgatcgccgcgttcggggtgaacgggtttaaccgtgagcatctcgaagccttgcagtatcacggcgtgaagcgggtgctgattgcctttgaccgggacgaggccggagaccgtggcgcggctaatgtggcggctgacttactggaagccggtatcgaggcatggcgggtgcagttcccgccgggcatggatgccaatgactatgcgctgaaaagcggcaatgccgaacatgcgctggggctggccttgcaacaggcggtctggctgggacagggaacagcgccgggcgcggtgttcagccatgagcggcccgtcttgccgacggtgacggaaaagccccaaagtgccggggtggctaaatcttcttctttagccgccccgccggcgctgaccgttgcccccgtgccctgtgagcgcacggcgtccggtgagttgttgatgaaaagcggcccccgggtctggcggatacgggggatgaaaaaatccccggtaccggacgtgatgaaagtcaatgtgcaggtgcgggatgaaacgtccggcctgttccatgtggatacgctggacatgtatcacgcgcggcatcgtcagcactacatcagcacggcggcgcaagagctggaatgcgagctgtcggtcatcaaacgcgaagccgggcgggtcttgctgatgctggagcagcaacaggacgcgcaacagcaagccgacgccgaagcctcagggacaacggcggtgacggtcagcgcggaagacgaagccgccgcgctggcgttgctaacatcgccgaacctgacagaacagattatcaacgacatggccgcctgtggggtggtcggcgaatccaccaatctgctgaccgggtatctggcggcagtctcgcgcaaactcgataaaccgctggccgtgttaatccagagcagcagcgcggcaggcaagagcagcctgatggatgccgtgctgaacctgatgccggaagaggagcgtatccagtactcggcgatgaccggacagagcctgtattacctcggcgaaaccagcctgcaacacaaaatactggcgatagccgaagaagaaggggtgcggcaggcggcctatgccctgaaactgttgcagtccgacggcgagctgaaaatcgccagcaccggcaagaacgagcagagcggcgaactggtgacgcgggaatacagggtacagggaccggtgatgctgatgttaacgacgacggccattgatgtggatgaagagctgctgaaccgctgtctggtgctgacggtcaacgaatcgcgtgagcagacgcaggctatccacgccatgcagcggcaccgccagacgctggccgggttgctggctgactcggagaaaggctatctgacgcagttacaccagaacgcccagcgcctgttaaggccgctgaaagtggtcaatccttacgcccatcaactgacgttcctgtcagacaaaacccggatgcggcgcgaccacatgaaatacctgacgctgatacaggccattgccctgctgcaccagtatcaacgtgaagtgaagaaaaccacccaccgcgggcaggtcatcgaatatatcgaagtcacccaggacgacattgccctggctaaccggctggcgcatgaggtgctggggcgcacgctggatgaaatgccgccgcagacgcgcaagctgttactgctgatacaagagatggtgaacgcacaggcgcaaatccagcactgccagccaaatgaagtccgctttacccggcgggatatccgcgcctttacccactggagcgacagccagctcaaaaaccactgtcaacggctgacggaaatggaatacctgctgttgcatggcggcagccgggggcacctgctgcattatgaactgctgtgggacggagaagacaacggcgcagcccacctgtgcggcctgctggatgtcggagaagcggactcagaaaccgccggcagtgaacgcaagtctgacccggaaggtcgtaagtcttccccaagtccggggcaagtctggcctgagtctggggaagaaaaacccgcgtcagcccagacagaacaagggccggcaggggcacaagtccgggcagatgaaaacgcagttattaaggaaaataatcacagaggcgcattgcccgtacccgacagggataaaacgccggcagccgtcccgacaggtcatgagagcaagtctgacttaaatgaacgccagtctgcctcaagtctgggccaggtccgggctaagtctggggtaaaaaaatccccatcagggcaggcagaacacgggttcagcgtaccgcaagtcggggtaacggaagacaccgtgataaaaggaaaaaagaaaacacgccccttgtctgcgcccgcccctcaatctcaaccggaggtcaatcatggcaaaccgtaaaccccgcaagggaagtctcctgaccgtcgatgacgtctaccgtcagcctgtcggtccggcacatgacccaaaaagcctgtatgcgctgctgctgcgcttcgtggcctggcggcaggaacggaactggtcggaaaccacgctgaaagtgcagacccatcacacctatcactttatcctgtgggccacggaccggggcctgtactatgccgcggacatcacgcggccaatactggagcgttaccagcgctacctgtaccagtaccgcaagaccaacggagagccgctgagcatccgcacccaacgcacgcagttgcagccgttacaggtatggttcaaatggctgacgaaacagaacctgatactggcgaacccggcagcggacattgagttgccgcgggaagaaaaacgcctgccgcggtatatcctgagcattgatgaaatcgagcatatcctgtcgctgcctgacccgaatacgttgcagggcgcgcgcgaccgggccctgatggagctgctctggtcaaccgggatacgacgcagtgaagcggcccggctcgatatctacagcatagacgggtcacgcaaaacggtgaccatccggcagggcaaggggaataaagaccgggtattgcccctcggcgaacgggccttaaactggctccagttctatcagcaacagattcgcccgcaactgctggtcaccccggacatccaatcactgttcgtggcaatggacggtctcgacgggttgcagccgaacggtatcacgaatgccgtaagcggttatatccgggccgccggcattgagaaaaaaggtgcctgccacctgttccggcatgcgatggcaacgcagatgctggagaacggcgcggacctgcgctggatacaggccatgttaggccatgccagcgtggagtcaacccaggtgtatacgcaggtctctatccgggccttgcaggcggtgcacgccagcacccatccggcggagcaaatggccgacgaaaaagtccgcgacgccgatgaggtgggtttactggccgacctgtacgccgacgataacgccgacacggacacgccgccggacagttcagagccgacctcaaccgccgatagccgctgagcgtccgcacgcccccgttgagttgggcgggttcggtgtgggggcagaccgtggccggactgcccgtcggcatcggcgcacgcgggggtaaatagtcgtcaggcggctcaaccacgagcgtccccgttaagccggtccaggccgcccaacgcctattgaacataatgcgggggaattatacgcactgcgccggtgagcccgggcaaccgcctgagcattgatgagcggcttaatgcgtataattggcattatgtcttgcgcccccgcgggtcagcattggcgggtgtggcgcacaaggctgcgccttatgctctaaccgactgagccggacatcggcaactctgagttcttctttagctgccgtgccaacgtccggccaacaaccctgaaggcagatcggcctgcggcctccgctcattgacttccccccgccccaaccccgctgcactggctgcgcccggttcgcagtcgcaggctccttgctcattcccgtgctcgccatcgccgccccgtgcagcccccgggggcttccctgaacaaaacaaaaccgcgtggtcatgcaaggtcatacgcaaaccgaagccacagtgcctcagagcgtcgcaggggcgccgcttgcgggctctgtgccgcccgcgcccgcagaacgggcacccgccgcccaagcgagttgggcgacgttcgcccgttgccgaaaaaggcgctacactgaccagagcgcggcgggaaaaaccggccttcgggggcgaaaagcgcgtcagggggttttggggccggcggtgaacgcccattggaaaaaacgggtggtaactggctgagggcattgggaaaatcggtgtttggcggtcaacgtcgcaatggaatgggttgttgtggagaataatgcgctggcctcgcgaaatctgggtgattgccgcacgctgtcaccggaagcgtgcggcaaggctaaggagctgagccagcgcattctggataaaggcttgccgtcagtggaggacatgcgcggtaaactggcatcatgtcaggatgacagctgccgtaaaggagtctggacagagtaccggcaggccagtgatgcgaccatcaacagcctgaaacagatggcgttgaatggtgagttgagtcgtgaagaactggcattcatcaaccatgaactgggcaaggagctggccgtctcaggttaccgtgccaatgacaagatagggcgttcagagcagagcagctggttaaatggcggcagcggacccctctccgggttttttaacacggaactgcgtcaaaaagagctggaaaaatcgggcttgtccaaagcggatgcggcgcagtacgtgaaggaagagcagcgcaacctgttgttgctggagactgcggtcggggctattgggggagcagccagtaataagatacaggcgaagccatcatctgtatcatcaaaaaataatgttgataaaagcgttcc

SEQ ID NO: 36 - DNA, 460203 bp, Photorhabdus luminescens
  misc_feature (208715)..(208715): n is a, c, g, or t
  misc_feature (208717)..(208717): n is a, c, g, or t
  misc_feature (460103)..(460103): n is a, c, g, or t
  misc_feature (460124)..(460124): n is a, c, g, or t
tgaagacattaattctcctgcaactaaatataagatattgataataaataaatttagccagattgttcaccttagctaatttcgtcgtcatcaatgtaacgcgtattttttataatagccgatacataatgaatcattattacattattcttagggattgttattggtcgatgatcgctgtttatacttgaaaactgataatcaccatttcgtgttatgttcataatttttatcatgttatgaccattatttgttctaacaaaaacttcatcaccgggatgcaccggagtgtttggttcaataacaacaaattcaccagactgtatgcggggccacatgctatctcccttaacttttaatccatatgcatcatgatcagtactacaaatgcgtaaccatccagcatggaattcaaccatgtctacggcaccgtcaataccgagaacagcttctccaattactctaactaatccgtttttaggctttccggcgtattctatttcttcttttttatcttccgtaccgtaaagtagataacttacagaacattgtaaggcgacagcaagctcagggagaaaacgcggtctttttgttttccccttttctagttgttctattgactgttgttttgttccgatcaaatcagccagctcagtttgagttaagcccatctcaattcgtctagtttttactcgctctgcgatcgtcatgtattcattacctcatttacacccccaccttaattctcacaagaaaacctgtatttgacaaacaatctaatttgtattttaatacaagaaattttgtcaaggaggtagtatggaaacattatcagagcgactcaaacggaaacgttcagagatgaacatgacacaatctgatttggcaggaagggtagggatgacgcagcaatctatacaattgatagaagctggtatcactaaacgtcctcgtttcatatttgagatcgctaatgtattgaagtgtgatccatcttggctgttatatggaaatccaaactaattcgtataacaacaagaccgctctttaacatctcagcaccgaaaggtgcattcctcactaagcggggagcgtagcccaattttagggctattaactttattttatttaaggaaatttaacagatgaatatcgcaatggaacgcaaaactaaagaaatcgaatcacgaataagaaagggaattgtcattaccgggcctaagcatgttgcaaatgcggttggcgtgcatcagtcgcaaataagcaggtggcaaacagaacagaccggctttgtcgctaaggccgccaagttgctggctgcaatcggttttgatgcaaatgtacaggaagtagttattcatggagaagaaacagcacagatagctaaagcgttgcaagagatgctatctcacttaagagaaagcgccccgtctgttacagcagatgaggctaatcaaatataagtcaataggggagctctcatttcccctaacatagcgaggtgattatggacagtttcgactatcacgtcaatgtcttgatgccggcgaatttctttcgtgatgatgaaaaatggattcgagaaatgctgttgcagctcgatccgtccactcgcggaaaaatcacggtgcgttattcagaagtgtatgaagcggcttgggatgaagagccggtatcgtaccggaaagataacatcgcacggcgtcatgcaaatatccggttaagagaatttgtcaggaaatatgctgctttcagccaggggtatgtaacaacccctactgagctgctgaaaacaggcactagccagcaaaaccagcccataccggagccgcttaaacaccgtggagggttcttttctggtaagtgctgaaagtcgaggtttgcacaaggccaaaacccggaaaacaaggtcaaggtcaacggcggatcgagtcacagaatctgacatatagaatcatagaagggacgacttaaaaatatgtttaaaatcaataggttaaaaatgcgtttttcccacagtatgggacaatttgtcccacagtatgggaaagtctttaaaaacagtgggttataagtaatttggcgggtgaagtgatgactaagcagtcaaaaatacacgatgttgaaattatacccaatcatgacactaaaggccatatattcattcaggcatacgacaaaggtattgattttattactaaatgtgcacaagagagagataacgcaacaataattttgtatttaaaaatgatcaaggacatggacaaagagacaggggcgctgatggtcgatgtatcaacgctcatatcacaaaccggcttgtcaaaaagtgcggtgtacagatcgataaaaaccctgaaagagtcagggatgatacgcagcaggtacagcaaagtttacgagataaacccggatgggttctggaaaggcaagcgggagttacgagataccgcgttgttttttgctgaatcaaaccgggcaagaaatgtgaaatacagattgaaccctgccagcgctgctacagattcattcactgttcccgctacgtttgaagaggaaacatagcgaaatcatcaataaaaatcgattcggaaactttggcgagcgaccccgaaccgactttcaaaggattcaatatgttaaatataacaccgaaggttaagcaggtcaccgcgcttaacatgcttcgtcatgactggaaaaaacatcgaacgtttttattatcggccagtgtaggctttggaaaaacagcaatagcggcgtttattgctgacggatttgtcagtcatggtatgagagtgatgttcgtagccccgtacacagtacttctcgatcagactgcgacccggttcgttgaatacggactgccagcagatcaaatcagctacgtttggcgaaatcatccactacatgacccagatcgactaattcaaattgcttcggctgacacgcttattcgtcgtgagtttccagacaacatcgacttactgatcattgatgaagcccacatgaagcgccgtaagttactggaaattatcagagatagcgacattcgagttgttggcttatcaggaacgccatttgcgacgtggatgggtaaatattacgagaagttgattaagccaacgacgatgaaagaactcattagcattggggatctgagcaaatatgagttctatgcgcccgacaggcccgatttgaccggcgtgaaaacaacaagtttagcggcttttggtaatgactataacgaggagcaactagcccagatcatgggcgattcaacgctggtgggcaatatcgtcaggaactggctggagaacggcgaggaccggccaacaatctgcttttgtgtgaatgttaagcacgctaactatgtcacgatggagtttaacaagtctggtattaacaccgaagtgatgacagcagaaaccccacatgatgagcggcagttgatcattaacaggtttgaacagggtgcgacgaaaatcatcgtcaatgtcggtgtacttgttgccgggtttgatagtgacgtgcgctgtatcatttatgcccggcctacaaaatcagaaatcagatgggtgcaatgccttgggcgagggttgagaacagcgaagggcaaagataaatgcttgatattcgatcacagtggcagcgtccatcttctcggcttccctgatgaaattgagtatgacaagttgccatccaaaaatgatggcatgaaatcttcatcaagttttagcgagaaagtcaaacaagagaaaatcccgaaagaatgccatggctgtcattacatgaaaccggctggcgtctatgtttgcccgaaatgcggtttcaagccgcttgctggtgagaacgttgatgttgatgagtctcgcgggctgaaaaaattagggaagaacgagcgaatttacagcaaggaagagaaacaaagctggtggtcacaaattaaatattatcagcgtgaacgggaaaatcaggggaaacccatttccgatggctggtgcgctcatacatacaagaaaaagttcggtgtctggccgcacggcttaagcgatcacttaattgaaatctcaccggaagtttacaacttcattcgttctaaacaaatcgcgtgggcaaagatgcaggagaaacagaaaaatgcgaacagtggaagcagtgagagggcggtggcctgaaatttttgaatactacgatttacccaatgttacaggaaagaaacattatgcaggagagtgtccggcatgtaagcgaaaaggaaaataccgatgcgatgacaaggacggtaccggatcgtggatatgtagttgcggtgccggtgatgggtggaagctgctagaactaacccaaggaaaagatttcaagacattagcaagagaaattgattcactaataggaaacagttacaactacaaacgaggtcatgataagcagcaacagccagaaactcaaacaatccgtgtaaaagtcatcagtaaattttcaacactacccccgctaaacgataccgccgctcaacactacttgttcaatcgcggcatatttgaattaccgtccggccatattcgtttcaatacggaagaaaaaacgccatttgggaataagcaggctatctggtcaattgctacggatgataaaggggcaggctgttatctccatagaacggtactagacggagagaaaaaagcggattttgacggtaataagcggatgctgaaattgcaggaagataactatctgaactttgctaattccattgctatccgcatgtttccagtctcttcaactttggggatagcagaagggatagaaacagcattgtcatgcaaacagatatacggctgcaacacctggtcaactctgaatgccggatttttacggaagttccgcgctcccaagggagtgaaacacttaattattttcgcagacagggacagtaacgggacagggcttgctgcggcgtttgagtgtggtaataaaaatattctgagtaacaatgatgtggaacttgtcagcattcgttggcccgaagccggggatttcaacgatatgctgatcaatggtgccaaagtatttcaagagcagttacagagatgaaggatttttgatatgaaggaaattaagccatgcccgttttgcggtagcaaagatgttggagtatttcggcaatatgaagatgactgtccgtatcgttcatcaattgtcagatgcttcaattgtgatgcacaaacagcccagtttattaatgatgatatccgtcgacagcatgaaatggcaatcaaagcctggaataagagagtaaataacgatgagtgaagaaagaacatttctaccatgtaaatgtggcggtaaagctatcaattgctgggtgctgcgtgattataacgatgaaagtaaaggcaggtggcattatcacaaatgccgtcgctgtcaaaatgaaagccaatcatatccaacgctagaagaatcagagatcgcatggaataagaaagtaaataatgggggataaatggaagctgatttttgttttcacgaatcaaataaatcacaagcttgggaaatattaaaagaaacacttgaaactaaacagccgcaccgaattattattaagccgtggaaagatactcgctcaattccacaaaataacacttttcatatgtggtgcggtgaaataagtcgttatttaaataaaaataacgctaaattgacgccggaggatgttaaggaagcacttaaacatacatttttgggttatgaggtcatagaagctattgatctcactacgcagcttacagagcgcatcaggactctgagaaagacgtcaaaattagatacgggtgaaatgttctatttcatgacgcaagttgagaaatgggcttttgatattggctgtttagtgaccatcccaaataactcacaatatatgaaattaaaacaggagcaagatagataatgaatgactggatactctatttctatgcgtttgctggcgttgtagcgacatttgtttgcgggcttatatggctgtcagcgtcggcaaggctattttatctttatgcgctgtggcagcttaagcagggtaaaagagcattgcgattaggcagagaaatgaagagagaagcaaaacagcttatagagtctaattttctcgcggctgcggctgcttttgagaagaaaagaaaggaataaataatgggtggttaaatgtcccagcaaacatcacagagtcagaagttaaaacgtttgattacgttcatgagctattgaaatcaagacgggacagacggagaaatagaaatgaaaaataaatatagtgaattgtcagattttgaaattaataaattagtattgattcaggaatctaaagaaagccttgcagaaattatcaatattcgacagcgtaatcatgtgtttcgtatatttcatcgtcaagtaatagctgatgttaaatttaaagatgaatctgatttttcggaaattggaccttttgatttttgtaataatccgtctgatgcatggaatattattgttaagaataaaataagcttagtctatgtaaatgatttttggtcagcacgtcagtatcataatgcatgcattgaagttaacgataagaatccattaaaggccgcaatgattgtatttctgatgatgagtaagggagcgacatcagtatgaatgtatataatttaaaattgccgtggccgccatcaaataacacttactggcgacatagcaggggccgacatttcatctcatcaaaaggaattgatgacatgcgtatcatccgcagtgaaagagtggctggtggttctcttaatattcagatatgggagataggagatgacaatcttcactgatatatccacagcaatagaagaagccagatatcttcattcaagaacaagaaaaaatcatgttgttctgcaatgtgaacatgctcgattgagagttactcaggatcggatagtcaggggcaaaaaatacacagtcatgttctcaaccaaatatgacaaatatcattcagttttattagaggtgggaaaatgaaccttgaatcactaccgaagtatttttcacccaaagggatcatgtttagtgactctccatctgcaactgctactgactcattctcaattaccgatgttatggcctcgctagggttggcgtccgcaaaagcgaggcttggcattgagctgtttttggcgaaacaggggatcaacagtattgatgaagccgtggagagcctttatcaatatgcaatgactcaggttcataagcatagtgctattaataagcttgatgaggatgttaagcaaaatgttctgcaattactcgcaaattatgcatttcaggattatgcgagaagtgcagccagtaagaaagtgtgtccagattgcgatggtggatttattacagttcgtaaattcacaacaaagtatggaagtagtgaaggaatgctggctaaggcattaaacatgaaacccaagcgttttattacctcaatccgagaagtagaggaaagatgcagggtgctttgcaagacctgcaaagggaaaggctctgtgagtcattcttgtcgctgtaatggacgtgggcaagttttggatgaaaagcagaccaagttacaaggtgtgccgatttacaaagcatgcctaaaatgctccgggcgtggatattcaagactgaaatttacagaagtctttgaagcaataaagccattaactgggatatctaaaacaacttgctatgacaaatatcaaccgttgtttgagcagttagtaagtgaatgctttaaagaagaggaacaagctgattgcgttttatcaaaattaacaaaaagagaatttatttctttttaattgttattttgtgggaaattaatattgacgatttcggaaaaatagcctatcgttattccaacgatgggtaattgcacttcgttgaaaccaaaagaatcccaagcctcgctattccgcgaggtttttttcatatatagggctgcgcatggcgcggctttttttgtattaactgagtgagaatgtatgagcagagaagacctgctatatcagatttactattcatattgcttagagaagatgctaggcgttattactgataaaattaattggacatcttctttcctgctgatactacttggttcaacaatcgctattatcggggattactatacggtatttgcagggttgttaatcactgccattgcgacaatgaaaatcatgttttcattcgaagtgacatcagaacgcgccaataagcaatcagcacgctatttgatgctctacaacacttcacatctgatcatctccgatgaagagttgttaaacaggcttgtgaatattcaggaggatgacaatagaccgtgggcctcactagcgtatccggcaatgttacaggccagtcaggttttaggcaggccaacggacattcaattaacatggtatgaaaagctgatggcttttctggctgattcagtgcctgtacgctaacgtttaaacagcaggagaaataggatggaaaacaaagaaaattcaacagtaatctttgcaggaaaagaggtagaacaagagcatctatatcatttgctcgaagttatcgcgcccgcagtctgtgaagtcgccattcaccatgctaaaaacggtgaagacaccgagatagtgactaaacatgcgaaagcaacagccgaagctattgtttccgcattgacttttactaagagctaagggctttccacgtccttatggagtcgtctttcaatttttgctcaagatcatcaatctgtaatagctcgttaaactccgcttcaagttttctgagttcaagcaaatattgagcgggtgaaagttttttgtcagaacggcgtaaatattcaaatgccagtgtctgcgcatctgtcataacagattcctctttggttgtagggactaaagatgataccacgcgccgggcgtgaaatacccggcaacacttcaagggctgcgatctgacgcggcctttttcttttcacacccgtaatcgcggggacttaatccccagcgggggtggaaatatgaagatgaaaaataatcctgatttatgggctgaattaatagacggcttaaaacattcgtggccgcaagtatctggcacggcagccgcaatattaatttgttggggacgtctgatttatgacggagtggaatgtaaaaacaaatgggctgaatgcctgttatgtggagttctgtcatgggcgatatccagcggtattgaggcgttcggtatttcctccgccgtatctccgatgatcggcggtgctgtgggatttatcggtgttgataaaatcagagaaatggctatccgtgccattaacaaacgcattggtgatgacaaatgactagaggtattcgaaataataaccctggcaacattgactataacggattcaataactggctcggtcaactacctcttgatccaaagattgaaccccggttctgccggtttgagtcacctgagtatggtatccgggcgctgttcaagctactgcaaaactatcaacgtaagcataatctgaatacagtcagagagattatcaatcgttacgcaccgccacatgagaacaatacggaaagctacattcagtttgcggctaagaaggtgggtgtctctgcggatgatcggatatctacccaagacaagataatcctgttcgctttagctgaaggtattatcaagatggagaacgccaatcagcaaccctattcaccggagacgttcgaacgggcgtttgagatgctatgaggagttgagtgatgagcattattcagattctggttccggtaatttattttgtcggtgttattgctgcatttattatttttatattgatagaaaaacgagtcaatgatccggaggagtttggggtcattttgtttatgtcattcatatggccgctactgattattcttatgccaattgtttttggattcttttttttaaacgagatatacaatcaattcgttggcagacggtcatgaaatttaacgctagttactacacgatactcgcattaatcgttatctcactgacagcgtattactatcactctgagttacagagagagcagcgagtgacaaagcagcagcaagaagacattcagcagctcactgacactatcaactatcagaacgctcacatcacgatgttgaacgagcttgatgtgaagcatacaaaggaacttgctaatgccaaatctgaaattgatgttctgcgcaatgatgttgccgctggtcatcgccggttgcgcatcgcggccacctgtaatcaaggcgaagccggttcctcctcccgcttggatgatgcagccagcccacgacttaacccagcagctgaacaagattatttcgatctccgaaaaatgattgttgaaaacgagcagcaaacaaaagctttacaagattacattagagccgagtgtcagtaacagcctctgtagacatatctctacggttgctaaagcgtgggcgagtaaatacagctcagttaagtcgttcccaaagtgacggtcttggagaaatcaacggtttaagtcaacaatagggatttcctctatggttgccaattaatgaagacaagtaactaattcagagcattctactgacagagtgctctgttgttcatcaccttgtttttaattcataatctgggtgggaatcagcaagaagaagcaataattcatactctccagacgaaagagagcgattagttttaccttccgcctctttctgctgccagctaacaagcgcataagaaaatcttttggctgcttgtgattgggtcatgccagaagctatgcgagcgcttctgacatcttgcggggatggtttaccgatgaacttatcagtcatcgttccagtcaccatagcttttttcaccagagtaatattttttaatttcatcgtagcgtgatttctcaagttcacccgattttacaagcgaccacagcgaattaagtgccgaagtgctaccgcgcatagcatcatttactgcttcacgaaagcgcgcctcgtcggcttctttaacgcgtcgggcaaattcagctctttcttctttgcttgcagtatgaaaatcaaatttaacatcatcggcatggacgccacgctttgctatccagtcaaaaaagtcttttctggcaaagaattcaggcactatgccgtagttatctgtttttacatcagtcattttcaatctcctgtttagtgatgtatacaatatacattcaattgaatgtaatagcaagtaaaaagtacaataatcgccaaaaaattagtcattttataaaattctacaaaaggtgctcataaagtgcctttgacagagttttgtataagtatttggtgcgggtggtctcacgatagtacgggattatatttcagcatgtagcataaagttctgattacagctgtttcctagatggaagtgattcaaactgcttctgtttgatgatgtaatatacaaaatactcggctagggtagctcccgaaaagcggatttcgtcaccgcctgctgagcactatttcatgacgattaacgagacgaggttaatatgaagccaattgaatatcttgaaagcatttctctttatgattctgttgcgcgtgatgcattaaatgcaattaagaccggcgcattcacagaagaacaagtaatagctgagttcatgaaagtaaaagccttacaaaataatgctctattggaactgcttgagtggaaaagccttaaagaggccaaaccttttcaagcaacaaagggtaagggaataccaggcactgttagaatttcatatacagcaacagatgagcacggcaatgaaactttgcagaaagaacaccacatgcttcttactgacgtatataggtgccgttttatcgtgtttttagaagaattaaagaaaagtgcaaaagagttttatgaaacagtcatggagggggatgagtgggatcgaaaagatacaagcgaaaagagtgcagagtgtttaattgtgaacggaaagcaccacggtaagcgacgcactttaacttcaagagctgaaagatatctggttgtaagcgatgatgtgtttccgtgtgttgatgttgatgaaatccctgtgcatttttgggtaaatgaagcggacggtaaaatttacatgattgcaacagcagaagaattaaactcgtctgagattagtttagcgatttcggaaacagatccgccgcttaagccgatatattaaattacaggtcgcccagtgcggccttttttatttaagggaaagagatgggacaacaaacaaatcaggttggttgccctagcaagctgaatgatgagctaatcgctaaggcaagggattatctgtacggcggttatgaatcagttggtgatgtcgttcctagtgtagccggattagcttgttacttggctattgcacgttcaacagcatatgaatatgggaagcagtccagcgagttttcggacatcttagaaggcataggggccatgcaggaaaacaagcttataaacaaggggctgactggagattttaattctacgattgccaagatgatgttaacaaaacacggctattcagataaacaagaaatcgatcaccggtcccctgatggttctatgtctccaaaaccaactattatcaggctcgttggagtcgagccagggcaatgacggtagcagttgacctgccgattcccgcaaaactcgtacctgtatttacaaaagaaaatgttcgttaccgaggtgcacacggaggcaggggcagcgctaaaactcggacatttgcaatgatgagtgcggttagggcttatcaagctgctgaatctggtacaagtggggttattttatgcgctcgcgagtttatgaactctctcgaagaatcatcaatggaggaagtgaagcaggcgatccgttccattccttggcttgatgactatttcgaaattggcgaaaaatatatccgcacaaagaataggctagtcaactatgtgttctgtggcttaagacataacttagacagcatcaaatcaaaagcgcgtattcttctggcgtggattgatgaagctgaatctgtatcagagacagcttggaaaaagttacgaccgacagtacgtgagtctggttctgaaatatgggtgacatggaacccggaaaaggacggaagcgcaacggataagcgacttagaaagaaaccaccgaaaagctcaatcattgttgagatgaactacagtgataatccgtggttccctgatgtgctggaggaggaacggcaggaagacttggaaagtctcgatcactcagattatgcgtggatttgggagggcgcttatcttgagaactcagagaagcaagtattagcgaacaaatacaagattgaatcgttccctgatgatctgtggatgcaagccgaccgtctattgttcggcgctgacttcggtttcgcccgagaccccagcacgctacttcgcatgttcattttagataactgcctgtatatcgaccgtgaggcttacagtgttggggtggaactcgatcacatgcccgcgttttatgaccaagtgcccgagtctcgtaagtggcccatcaaagccgattctgccagaccggaaaccatcagttatcttaagcgtcaaggcttcaatatatcagctgcaaagaaatggcaaggcagtgtagaagacgggatcactttcttacgtggtttcaagaaaattatcattcatccacgctgtaaagagaccgcaaaagaagcccggctctactcatacaaagtggatcgtatcaccggcgaggtgcttcccattattgaggacgcacataaccattgctgggatgcggccaggtatgggttagatggatacataaaaggcagaacaactgtttgggacatcatgtaatgacgaaaaaaacgatgattggccgtcttactgatggccttcacagtatgctgacatctctcggtgagcgggtgtcggcaataaaatatgcgagcaataataaggcagatgtgcctgataaagagttgctcgcaatgtataaaagatcatgggtggtcaagaaatacatagataagacggctgatgatatgttgaagctaccccgcgaattatccggtgatattgatagctctctggttcagcgcatcaaagacacagaaacagcactagccgtctataagatatttcatgacgcgctaacttgggcttcattgttgggagattcattgattgttgcaataactgattgcgctgatgagatgattagtgaaccgctaaatctacagtcagaagacatcattaagtttttggtactaagaaaagaggaatacacgccctctgataatgttatctcggatatcgcatcaccacattttggacatccgcagacttaccagatcagcattggcaaccaacaactcaagtttcattattcgcgttgccatcgtacaaagctgggtaagcacagcattaaagatataacgaagtacggaacatctgacattcaagcgccatatgacgctatcaaaatattcgatgcggcaattgtcagtactggggacacgatccaggaggcaaatgttgatgtcatatttttgccgggtttaaataatcaaattgatgcgggacaagagacgcaagttgtcgaatatgctcgtgtgatgaagcaaacaaaatcgtcaacgggcttaatgctaatggacgccggtgatagcacgatgcagagccgctatgagcaaaaaacagctcaattctcaggactgtctgacgttattacaaagatggctaatgtcttagctggcgcacttgaccggccaataaatattttgttcggccagtcagccagcggctttaactctggtgaagaagataacaagtcgtattacgaaacaatcaacgggttacaagaaactcggttgcggcccatgcaagactttgttgatcaattcattctcgacaaactagccgcgagcatcgacacaatcagctatgaatatccgtcaatagacagcattaacgaagctgacgaagcaacacggtttactcagtatgcaacggggttcacttctttagtccaatctggcgttgttacggaagatattgcactgcgcgaaatgcaagcacggggcgtgctgacgactgtgactaatgaggaaatcgaagctatggcgggggcaaataatggacagtggtatcagcctgaaacagatgctggaacgcaagcagggacgtttgaaggctcgcaaccggctaatgcgtccgccaacgcctagcaaacgaaccgaagtttggtatcgcgacaggctcattgagtttatcaggatgatgcaagatgttgtgatagatgacttgcaaaaaccaatattaaacgacgcacccaacaccccgccactttcaatcacttcaagactttcacgagcaatacaaaaactggcgaatatgtctattgctgatatggcaaagcgtttgtcattcggcatggtcaagcgtgcaaatgatcaaaacaaagatcaaacacagaaaacctataaatcagcgttcggtattgatttgacggggatgctcggtgatgaggttgtgaaaaaacagattgatgatgctgtgaaagagaatatcgatttaatcaagtcaatacagactgattttatcaatgatatcggctctaaagtgttcacgaatctgtttgatggcgggcgtcatgaaaaccttgtttctctcattcgtgagcgcggccaggtgacggaaagccgagcgaagcttattgctcgtgaccagacggcaaaactgaattcggcactgacagaaacccgccagaaagcgctcggcattgatttatacgattggggtggtgcgggtgatgagcgagagcgtgacagtcatttcgtattgaacaatatgacatgcaaatactcagaccctaccgtttattcagacgatggagggaagacctggaagaaacgcaaaagcattggggcatttgaggggaagcccggtgacgattatcaatgccggtgcgtcgctcttccgaaaatatcttgggattaattcatggcatggaaaaaaacaccgcaggggtatgttgtcacatctgcaacgattacccgcgccggtcccgtcgaatattacgggcatgaagttaagttaactggcgctgatgcaaacagaaaaatcactattcaccgaaccatcgaagaactttcaaaacccgaaactcttaaatcatttgaaggattacccgtcacgctaacgcatccgctcagcggtgaggtcaatgctgacgagtggaaagataaagcaattggacacatacagaacgtacgcatagaaggcgattacgttgtttgtgatgtgtatctgaaagatgccaaggcgattcaattacttgaagaaaaaggcattagagagctttcagtcggttatgaacccactgagatagtcgagaaaaacggtgaattacatcaaatcaatatcctcggcaatcacgttgccgttgtagcggaagggcgcgtcggcgctgattgtagactaaacgataaaaaaggtagaccaatgaagaaactctcattgaaagatgtcattgcgttgcttaagggtaagcgcgctaacgatgccgaggggcaaccactgaccgaggaagagctgatcggcatgattgccgcattagagaaaaccttgcaagaactggaaggtaatgcaacaccagaggccactgcaaaagcccaagaagttgtggcgcaactggaagagcttaaagctcagcttgagcagtcaaaaggggctggaacaccgccacccaatgatgctgatcctgatccggctggtggcagtgatgacaaagacgcccgtatcgctgcattggaagctgaaaacgaacaactcaaagcagagaaccaggcacttaaggaagaactggaaaaattgaaaggcgaaagcgacacaagcacaacattgaatgacgccaaagcacgtttccctaaggttcaatttaacgatgcgaaatgtgcgcgtgatgtgcgcatgctcgcactgttaagtactggggcattcaatgattcacaagtgaaagccatgtcggatgatgaaattcgggcagcttatgctgcggctagtgcgctaaataaaccacgtagcaacatcggggcggcattgctgaacgattcagcgaaagcgaagaaaacagcttctcagcgtttagggggtaaataattatggcctttggatttacagattgggacgccgaaaccggcacgatcaaacccggctctatcaaacgggcttcaagctcaaacgataaagtgtggggggaagaaaaccgcactgaaatagcgctgccctacggtactttcgtcgcggtaaacccagagggtggggtgaaacctatcacttctgcaagcgacgttatccacggcattgtcgttcgtgacatttacggtgacgcagctccgcataataaacaagtcaatgtaggacatttctctcatggtgactgtgtaggagcgctggcggttgaaaaagatacattcactcgtggggataaagtttatatcgttgcaacgggtaaggatgtgggaaaagtgactagcacagcaaaaggcaatattgatctaggctattgggctgaagaagttagcgcgggtaatcactgtgtagctatcactcttggttatatccacacccaaaaagtaggagagtaataaaatggctatggaacccgcatacttcgaagaagtattacaggaagcgctgacagagcgtgaccagcagttgcaggaaaaggaactgcccgaaattaatatcggtgaagcgttgccggtaacagaggggttagatttttcccttgagtacgtcgatttcggtgtaactgatgtgcttggctctctgaaagacggcattattggcaacaaaacgaactcactgaaaaccattgatagtgatattgaatggcacaaagcgccggtcgggcagtggggcaaatcagcaacttggacacagcaggagctggagaaaattgcgcgcttgaatattaacttacaaacaaaaaagcaagatgatttgtatgcaaacgcaacggcaacaattcagtacgctggttatgttggtcacgagggcgtaaaagggcaagaagggctgctaactggatctaaagttcagttaattgcagaagtaaccggcaaatcaatcaaagacatgtcagcagaagaattcattaacatggttcttaatgcttataacgtcgcttgggccaaatcgggttatcgcattcagccaacccacgttgcaatcgatgcatctgattttatgttggcaatgcagaagttcgacactaacagcgtgattgtgggtgtcgatttgctgcctgtttctgcaatggatcgtattatggcggcactgcgtaaagcatcgaacaatgattcattcagcattacttttgtgaaagtcccctctaactttgctaaaaacattgttaaagggaaaactcgtctggctatttatacttacagtgaggattacatcgaaatgaaggtgcacatgcccgagttgctggcagtgcgtcagcgcgacttgctcacttttgagtgtggctatcgttccgcattcggtggtgcaatgtggaaacagccaaaatctgctgtatatgtagattataaaagctcataaccacagggggtagcatggattttctcatccgttaccctgaatttgccaaaattgacgaaaatcgcatagagatagccttgcaagatgctgcaaatcagatgagcagcaaagtgtggggtaaactctacgagcaggggcgacaggctcttgctgctcacctcctctatgtctctggcgcattaacccgcagcggtaacagcaacgggaaacctgttcagacggcgacaagcaagtcggctggtggattatccattggctactctgcgcctgatgcgggtttcggggctaaccatgatggttatgcggccagcagttacgggcaggagtatttgcgcctgcgtaaacttgtctctcgacatatgctggtggtgcgatgattaagaattctggcaattttaagggggcagggcttaaggcgcttgaggcccgtataagggctttaagtaaaaagaaagtggttgtcggtgtgcctgcgtcgaaaaattcagatcaggacggtacaagcattgtgacgattgccgtcgctcatgagtttggtgcagaaataaaggttccggcgagggcggtaacagtttatcgcaagatgaataaagatggttcctttgctggaaaaggtaagtttgttaaagcaacgaagtctaactttgccagtacccatactgtacctgctcacaccatcaatattccagaacgctcatttctgcgttctacgtttaatgaaaacaaagacaagtatgccaataaattagtgaaaggtatcaagtctgagttgaaaaatgacggtgacccgcagcaagcgctagaaaaactgggggagatggtcgccagagatgtcaaaaggaaaattcaggcaggcattgatcccccattaagccaggcaactatcaagaggaagaaatcaagtaagccgctcattgataccgggcagcttgtccaatccattacttatgaggttcgcgatgattgatgattttgttaatgaaatctttgacgatgatttctttcggcaagagctggagttcaaaacatcggacggtcaaagccgggtgcttgtttgtatcgttcagccagccggagcggaagatctgcaaattctgccagaaggggatcgttataacccgactgtcagagtgatgacgcaagagtcggtagagaataaagagcttttcgtctggaatggctatcgctggcgcatcatcagcaacgcaagatggaatgactatggatactacgactctctcgcaactcgatacgaaggcagtcagacggacgatagcggcggttttgaaattacctgaatctcaggtgcttgatgctgacggtgagactgatgtgtctgatatgcagtcgtttatcacggtcaatcgggttacatcggaattaatgggtgaagaatataaattcaatgctaagaaagaaattgaaattatcactgtcacccgcgaaaccatcgtttctattaatgccttcggcaaaaatgcttatcttattatcgaaaaactcgccagtgttctaagcacaagttacgcgcaaactctttttaagcgtcttggtgctggcatagtccgaaaatcccaggtccgtaatcttcccactgctattgctggtggcaaagagcagcgggcacaaattgatttaactctctctcatatccaccgaattgaaacgtcagtaaaccaggcgaagacggtcgatattactgtttatgaggattagcaatgagcttatctattaaagaggtggtcaatgctcagatcatgccgcaggctatggcggcacaacgccgtgatttgagtatgatagctatttttacgccagagattggcacgtcgttcgctgatgcggatacgcgctatattattgtgtcaagcgcacaagacgtggcaaatctattcggtaccaaatcggaagcctacaaaacagcacaagcgcttttctctgtgcgtccaacgcctaaacgcgctcttatcgctcggtgggcgaaagagaaacaagaaattccggccacggccaatgctctgaaagggtctacgatctcagcaggcattaacgcattcaaagccattactgatggctcaatgatgctgaatgtcggtggtaaaaacgttttgctgtctggcctgaatttcagtaaagcaattgatttttctgatgtggcgagtgttctgcaagcggcattacccaaagacagcaatcttcaagctatttgggatactgtcggccaccgggtaattgtccaggcgcaaactgccggtgcttatcctgctacaaaattaggttatgtcacggaaccgggcgcaggtacttacgttggcaaaatgctgaaactggaagacgggcaagcaacgattgttgtcggcaaagccgctatcacagtcgaaaaagaattgccctctgaagctctgcataaattgcagaacgtttatcaaaactggtacggcgtctatttcgctgatgctattgctgatgaacagttagatgatattcacacctgggttgcatccgctgacatgaaagtctctgcttacaccgctctgcgtgatgaacaaatcgagtggaacaacgacaatatcatcaaaaagctgtatgacaaaaacagtggccgcttaatgtctcagtacaacaagactggcgatgatcatgccgcagtagcgttactggctattgcattgtctacaaactggaacgcgcaaaattcagctaagaccgtcaagtttaagcagcaaacaaccgttcgttctgataaccggattacgcaatcagaggcagaaaaatgcaagcggctgggtatcaacttctataccgactatgacggtgtatcgatgctggcagagggcacgatgatcggcggccaattcattgatgagattgttggcctggatgcattcattgatgcgtgtcagaaacaggcattcaccacattacaagccaatccaacaaaaatcccccaaacagacaaaggtcagtcaatgctgatcggtgccttgactgttattggtaatgagtttgtgaggaatggtttcctggctggtggtgtctggtggggtaatgatgtgggtgaattgacatatggcaatcgcttagatgcgggtttttatttctactctgacagctacgatttgcaatccattgctgacagagaagcgcgtaaagccatgccgattatgtgcgcaatcaaattggcgggtgctattcattccgttgatatatcaatccaattcaatcgttaaggtataagtatgtacaatcatgcaaactcgattctgacgatatcaggctatgagatatcgggatacgaaaatgcggccgatgcgcttaattttgcccctgttggtgatgacggggatatgacttacggagtggatggggatggtgtttatgtggcttcgtgtaataaagggttaattattacaataaagcttttgcaacattgcgaatctaatgagtatttgaatgacttacgcaatactcagatcaatatcccgaaagcgtataccccggcctatatttattataaagacgtcattaacggtgatgaaattattgccgatcgttgtttcttcaccacgccccccacggttacccgcggtaccgcccataacacaatgacgtggacactgaaatcaacccggtcaacaatgaaactcaaaaagggagtttataactgatgattattgacaatataaattacgaacaccgtttatctaatttcatcgaagccaaaaatcacgccttaaaactggttggcctgttaaagggttgcattaaattggcgggtgataaggttgatatcgatgtcggcgccatcgtttcaaatgttggttcacaggaaatgcagggcattgaacaatttattttgaaatatgtcacggtgattggtgcggacggcaatactgttttactacagaagccagacacgtttaatcagcatttcaatacttaccgatctcattatttccaactaatcattgacggattgaaatttcactttgcggattttttgcccggtggggtcgcctctgcggtaaatatgccgaacttggcggctctgaatctacagtaagtagtgatgttgactggatggtgtggacgccgatcatgagaaacatgtgtactttgcatgaactccgcaccatttattcactctctgatgtcatggatatgcatgaagccatagccgaaacgctattgtctgagaagagggcaaacgatggaaatcgacgaactactcgttagcgtcggcgtagacacgtcacaagcggcgaaaatcaaagatgtcattgtcgctctcggtgctgcggcagtgcagatcgcgaatgaggccaatggggttaataaaatcctggggggtgttggcgaagagtcagttaaaagcactgagcaggccgctcaaaaagccgaagaggccggggcgtcaatcagtaaattaaaattgctggctgtcggggttgtcgcggctgtcagtgttgcgaccacaaaagtgcttggctttattaatagttctatctccggtgccaaggatttagcgaaagaaaaagggctgctttataagatatccgacagagagctaaagcaggctgatgagtacgaagcgtcaatgaaaaagatggggctctctatcgactcggttaagacaaagatagcgctcaatctcgttccatctatgaccaaggccgttaatggtttcaatgcctggatcgcttcaaacaaagagctcatcactgacgggctgacaaagattatcaaagtgggtggcaaagttgttcaggttattgtcaactcagtccgtgcgataaacaaaattgtcacatcgactattggctggaaagccgcgattatgcttatcgttggtgctctggcaattcttaagcgttccatgctaatggcgttcattgccaatccggtgacttgggtgattgctgcgatagctggcctgcttctcttgcttgatgatctgatggtctatttagatggcggcgagtcattatttggcgcgttctggggacctgctgttaaatgggttaaagatgtcatcaagtgggggaaagacttttacgctaagtacaaggatatcattgataatttagtctcaatctggagcaagtcatttaaagcaattttgtctatcttcagcggagttttccaatatatctggaacgtcctcaaactatttgtaggtctatttaccggcgatatggatcttgttagtgaggcatgggccgggatgaccgccgcactgatgaaaatatggaatgggctgattgcctatctcaaagccttttttgctttcttcggtgtgatgtgggggattgcgggaaaactggccgccaacgcatgggatttgatgaagaaactggcaggcaaagcttttgattggataaaaggcaaggctaaaggttttgtaagtagtctaggttctatattcaggaaagtctggggctacatcaccgcgccgtttaagagggcatttaaatgggtgcagggactgtttggcgtgagtgaaaaagatgctgatagatatatcgataatatcggtaaagcgtttgatgctgtgtttgctttcatcaaaagtccatttgagaacgcgtttaagcttgtcaagtcactgatcgatatcgccactaatgacaacctgactttcaccgaaaaaatcgaagaaattttctctgctgtctggggctacattacagaaccatttaagacggcatttaagttcgtgctcggcttattcggggtgaatgaaagtgaggccgataagtatgtatcaaatatcggtaaaacttttgatggagttatagaggccatcaaagccccgtttaaaaaggcttttgactgggttgtggaatattacgataagaccgttgggaaggttataggggctataaaagatttcttcactggaaacacaaaagcagaagaggcgacatttggttttagtgatgatgaccttaagaatattcaatcttctgttatagctggttcaggtgattttattggtggagctatcgctaatactaccaataccaccaacagttcatcacaaacaacgacaaatcatggtgatgtaaatatgaatgtatctataacatctccgtcacctgaaaaggctgctcaatattctgtaaatgagcttaataaagcattgaaaattgctggttacaatacaaaaggacagttttataacggcgctggtggttagtttgctttctcttgcagctcttaagtgatttaattagcaacgatcttaactgttgtaagagaaggtttatgaaaagtttaatgttaccggttgtgttggctatctttttagttggatgtggagaaaaagatctgacaattgatgcttcaagctctaaggctttaaagtcttctacgcaagaaatttatcgctctctcgataaggatgatgcagcaaaattcaaacaggctgtcctcaatgtcggtttggctgctagcatagtaacaaataacgaggaagataagataaaggcaatcaacaagatgataggcggcaagactgccaagcagatcatcgaaatggacgagaagaagtaaacagccccgcgaggggcttattttttattatctaactgatttttcttatctttcatctcttcgatagattcagccagggcaatgattttatccatcaattcatgactgagggaaaccgttggttgagtctctggagcctttctatctaaacagtcctgtatcatttggactatctcagaattcattgaacgaccattttctttggctctttcggcaacggcatcccgcatgccatcaggtagtcgaagcatgaatttatcttgcgctgatacgggtttattagtcatctgcattaatcgtttagttgaaacagaaaaaggatactagcatattgacatcatgtaaatgcgtgtcataatgctatcatgtcattgtgacattattaataaggggacaagataatatgataagcctagataacagaaaaaagagcgcacaaatgcaactgagaacaacggagttcatgaaggagcaaatttgcaaattggcagataaagagggaatttctaagaatgcagttctgaatcaggctttggcttggtatatggatgaaagggcaaaaaatgcagcacaataaaagcgaagccccagttgcgcgaacaactagggcctctgagtgtcatttacctagcgtgataaacgactcagccattgtaacgaatggcgaatcaattttccagagtactaaaacggaaaaccagcagtttgccgctgctggtatccaagttgatataccaccggagagatatatgaagtcaattatcaaacattttgagtttaagtcaagcaatgaccaattagtaaccgtttcagggttgaaatataagggtaagcctgtgtttttcgctgtggagttagccgagggcttgggatacacgaacccatctaaggcactgaaagaccactgtaagtctttgattaaacttaattataacgattcgttagaattgggtttaggtgacaacccccgtggtgtcattcttgctgggcagtcagacatgttcagattggtaatgcgtagtaatttaccttctgctgagcgttttcaggattgggtgtgtgaagccgttcttccatctatcatggagacaggcagttactcaatcaagcaaagccagtctggtttgcctgagtatagaaaagccagaacgttgaagatgtcggttgatgcgatcactaacctgtttgagcttatgcccaatttgagtaatgaggcaaaacagtgtgcagcagctaacattgttaacccgatagttggttttgaagctgttccccttcccgcgctggaagagaaatattacacagccggtgaggtagggaagatgctggatttgtcagctaacaaaatcgggcggattgctaatgatcacaatctgaaaactgagcagcatgggaagttcttccttgataagtccgcttactctgataagcaggttgaagccttccgctacaatgagaacggcataaaagctcttcggcatttgatccacggtgttgaagtagcttaaggatttaaggccacggacggctcactgtaaataaattcagtagcgtgatgtaatattatggatatatatattttgctttggtatatttttggcgggcgcttgagactatctgtctctggcgtgctggagcggatagaagaaagccccacacgactataaatcgaagtgaggccagttcttatgctttgcaacataagattagcctcttacacgccgaaaggcaaggagacgctaaccatgaaacagcaaaaagcgatatttatcgccatcgttatttgtattgccgctttagcggctgtgctggtcacgaggaaagacctctgtgaggttcgcatccgaagcggccaaacggaggttgctgttttcatggattacgaacccaggtaagagcaacggcggggagcaatccccgccatctcttgttgttgagcatggctctcaagcgccctatcaccaactcttaattgctatctcatcattttattcatttttaagccgcttaattgcggttttttttcgttgtagagaaaagtatggacataatcagcgacttcttaacaactcaaagcgcttctattgtcactcgttcaattggcgagtttcagttagatgctgttactgttgaaagccactcatctacactcagattgacggaaaaccctatcgagtccggggcgtccatagcagatcacgcggttcttgaaccgaaagagattacagtaacgggcgtcatggttggctatgaaccgccgcggctagtcagtgacctcatgggctttgactcatcagcaatagatagctttccattgccgatggaaattagagctatgacaaaacagagtgaagccctggtaagtcgctatatctctactgtagatgctgttgttgaatcaacaagccgctctatggctccgttcctaccagattatcagggattagctgatgattcatcacagacgcttgatcgtgttggtaaagcatataacgacttgctcaacttacagaaaaaaggtgaaacaatcacagttcagacgggtatcaagctctatgagaacatgatgattgtcagcattggggttacacaaacgagtgatggttcagcagaattttctcttacgttgcgtgagatattcattgttgaaactcagaaagcaaaagggctgaatgtgaaaaagtcgcctaaaaaaaagcagatgggcaagactcagccgaaagaaacatcaaaatctgctcttaaggggatattttcatgatgtacgaaatcccagtatcaaccgaagaaatacaagagcaatcattcagtctatttaatatgaatcttagatttactttgcatttcaatcgtatatctaacgactggcagtttgatttgctcaatacaaacacagatcagtacattgctcagatgtatggacttacagtcaatagcccggcattgataacgaagaacttaccgtttgtgatcgtgatgagtgatagttccggttttggcctgaattctattagacgttctgagttgggtaacagactgaaaatttattttgtcgataaagaggtatggcatgaggcaattcggacgacaaattaaattaactatcggcaacacaaaagaatcaatagaaatcactaatctcagagttactttcgaagtatccaagacaatcacaagcgaacccaacccggccacaattcgggtctataacctcaatcaatcacatcgaaatctgattaccagtaaaacctataataaggcatcactagctgttggttatgatgagcttagagtgatttataccggtgatattatcgaagcaattacggttcatgatgatctggatttcattattgagctgacatgcggggatggctacgaggcttacacaggcgcacttgtgaacaaaacgctaaaagctggggcaactgatgctgatattctgtcagttgccacaaagtcaatgaaagttgataaaggtgtggttgatttaccaaaagatcggcagttaccgcgcggcaaggtactaactggcaatgcacgcgacatcatgcacaagatagcccgtaacaacggtgccaattggtccgtgcaagacggcaacatgattgtgttaccaaagaacaaagtattgactgacaacgagggcttcgttttatctcaggaaactgggatgatcggcagtcctgagaaaacggatgatggcctacaaatcacttgcctttgcaatcctgcattgcgtatcggcagcctggttcggattaagtcaattattcctgagtataacggtgactataaaatcactgaattagagcatgcgggcgattttatgtctgacgattggcatacgctgataacgtgcaccggtggaaaatatcagaaggtgaataatgaacaaaaatccaactctacttgatgtactcgataaaaaagcagaaaacgagcgtttggatattcacacagcattacccgcccgcgttgtttcattcaacggccacacagcaacaatcgaactcatgatcactcagacactaagtaacggtgaagttattgaactaccgcctttagcagatgttcccgttcaatttatgcgcgctggtggattttgttttacagttccggtgaaagcgggtgatgaagggctagctatcttctcagagcggtgtattgatggctggtatgcaacgggcaataaatccgctccccttgatgcacggcttcatgactattccgatgcattttttatccccggagtttgcagccagccgaagaaaatacctgatttctttcctggtggcgcgtctatgcagactgacgacggttcaacatttattcgcatgactaatggaaagatcactatcaagggagatattgaacacctgggtaatagcaaacaaacaggaaatcacgagcagtccggcaattggaaccagatcagtggtaacagcgaatctaatgggactgtcagcgctgcaaaagttgtcggcgggggcattgacctgcaaacccacgtacacggcggtgtgcaatcaggtggaagcaatacggggaaaccacaatgagggtgagacgcttagacaataatcatgactggacgttcggagataaccgcagtgattacgctacaaaatcagatgccattgctcagtgtgtgcaaacccggctcatgtctcttcgtaacgactggtttcttaatcccgatcatggagtgagatggtttgactatttgcggaaaaatccaaatttgatgcaaatggaatcagaattgaaaactacagttctgaagaccgatggggtgatagaaattaccgattttgacattcaaattgatagagatagccgaaaatcactggtaactgtcacttatattgatatttacggcaatagaaatgaggtcaatgcagatgctcaaaattactaagacaggaatagttattgaccaacttgcagatattcaccagcgccttgcagatggatttaagcgtatctacggcgaagatattaacttagaggctgatacaccggacggtcagatgatagggttgttttcgcaagaactagccaacattaaccaagtgattgcttttgtcgggcagatgctagatccctatcaatccactggcgcgtggttagaacaacgggcaatgtatgcgggaataatacgccgtggtgcagaatacagctatcttgatgatgtagtgataactggtaatgctggggtaaacgtaccgaaagacacagttttgactgatgataaccgtgttaagtgggtaatgcttgacgatgtcacacttaacgagcagggttctgtaagagtgaatctacgtagtaaagaacttggatcctttacacttcaacccgacaaacaattgcaaatggaaactgtcatagtcggtatagaaaaagttgttacgacaaaaccagcaaagcagggcactaatgaagaaacggacggtaatttgttacttcgttttatgcaatcacattcagtaaataactatgatgatagagcaggtattaaagcggccttattatctttacctgatgttcgacaagcagaagtttacgaaaactacacaggacaaacagatcctgttactggcgttcctgcgcactcaatgaatgctgttattatcggcggcaataataaagatattgcgctgatgttaattaagaaaaaaattggcgggtgtgcattctttggtaaacaaacatgtgaaattaacttcgctggagcgaacagaaaaattaattttgatagagctgaaatgattgatatcaatattgatgttgcgttagtcagaactagcgaatttcatgatattgatatagatggcattaagtcagcattggcagccactaaatttaacatcggcgaatcagtttatgccatgcgtctgacatgccaagttaattcaatagcgggtttctatatcaaatcaattacagtcaatggctctgacaaagcaaatattggccctcggcaatgcgcagtcataaaacacgaaaatgtgaatgtggaggtgttgattgaataaaaaaccagaggattttttgatatggcagtacagaggaaaacccaaggcccggcaaacagtcgggcttttgctttctgagagcgcgatagttttcaaatcagcagttaagctgactgaaatactcgatattaataaatcagaaaactatggattagatttgatagggcgacacgttggcattagtcgaacaatgaaatcatttgtcccaaaagattacttcggctttctgggaatagatagcgcacttggttttaataccggtgttttctatagatacggggactctctgaatgattcaacaaatcttgatgacaaagattatcaattttttattaaagccaaagttatcaaaaactaccaacgcccgacaattggaaatataacattatcgatttcttacttgttgggagatcaagcgttcattatcgataattacgatatgacaatgaatattgttattccttcaagttatttaacccctttcaggctgcatgcgataaaaaaattggacatattatctcgtccaattggcgtgcaatataaatacatagtaatcactgatagccacccgtttggatgggctaatgatccccacgcgtccggtttcggtgatggaaaattcacgaggattgtagatgtcaatagttaacaaaccagactataaagtctttgctcaagatgccaaatccggcgagattgaaacgttccccgatgtgcttcgcggctggggtgtaacactagatagaactgcgggcaagccacctcttgagtggtttaatgcaatcggtaagcgcgttgatgagtggttaatgtacttatcacaacgcgggttagcagagtgggattcaactgtagactatccgcaatatgccgcagtccagcattcagggaagttttatgtagcactcaaacaaaacataagccaacaacctgacagatcacaaaataattggcagtcaatggctgattttctaggcgctccaaaattggtcctagatgctttaaacacaaagcaagacaaaggtgactacgctacaaacgctcagttgaataccgtgtcttcagaactgaataaatcaatcaatgcagccaacactagcgccacaaatgccaacaacaacgccaacactcgcctgtcaaaatcccaaaacggggccgacatccctaataaaagtgagtttataaaaaacctcggtttagtggaaacggtgaataaggcgaataatgcggtgtcgtcaatcagcggcggtacaatcaaagcgggactaaatgtgcaaagcgtgctgagcgtcggaataagtcaaaataaaaatttgcgtatttcatctaatgaaaccgctgatagtcagattaatctaattgtgtggggaaattcaaacagaaaaactattttcgaatgcggagataaaaatgggtgtttattttattcacatcgattgtcatctaataatgttgagcttttttcgactggaaaaattattccatctgattacagcaactttgatgcacgttatgacaacgttcccgccggtgttccaatgccatatccccaccgctacacgccgcccggctatcttacatgcaacggtcagacattcgacaaatctctatatccaaagctagcggaagcttatcctgccggtagagtgcccgatttaaggggagagtttatccgtggttgggatgatagccgtggtgtcgatccgggtcgggtgtgtggaacgtggcaagctgactgcattccagatcacaatcactacaaagtagcttcaaaacaattagttgaagaccttgtattgaccggggatgccggatggtatacatcatccggcagtagcacgcgcacacgttcacttgatcaaaatacatatacgggcggcgttactgaagctcaagtaatagcaaacgaaacccgtccccgcaacatagcattcaattacatagtgagagcagtataatggcagaacaaaagtattctttagaacatgaaaccgctgtattgggtaaagatggtttggcaattcaggcaggctggataaaggtttttcactcgaatcagataacgagagaattcattgcttcagatatcgagtatgtgatgcttggagttagtttatcagccggtgcttatcctgatgccccggaactgccgaaaactaatgatgtggccgtttgcagaagtgttgataaaagccgctgggaaatcctcccagactaccgtggcaaaatagcttacgacacgttaacgcgagaaccgactgaagtaacagaaatcggtgagctgcctgacacgctcacattcaagaagcccccaactgatttcgacacatggaacggtaaagactgggtagtcgataaagacttactcaagtcccatcaaatcaacgaagcaaagcaacagcaagcagcactgttacaacaagcaaatgaaacaatctctttgctacaagactctgttgacttagaagtcgctacagactcagagaaagaagctctactcgaatggagaaaatacagagtattgctgactcgtgtagatgtgaaccaagcgccgagtgtggagtggccggaagtgccgaagtgattagataattttatattttggagtaaggggagatggtttgtaagtggctataaatgccaggttttaaattggggttttaccagagttttaccaaaattttaccagagccaaatcccagccataaaaaaaccaaccctaacaggttggtttttctggggaaatttggtcggcatgagaggatttgaacctccgacccccgacaccccatgacggtgcgctaccaagctgcgctacatgccgataattcgtattatactactgattttttatctaaaagcaagtactgaattttgtgaccgattgatttttaagcatttagttggctataaaatgtttaacctcggttagtatctgtaacagttgtgctagattgggtttagcatctttgatttcgttgccttccaggtcatataggtggtagttgccatttttatccaagaacagggtattttcgctggttgtaatgatcagggaaccatcatcaccggtaatcacccacggattatcacgttgtgccgcgaatagatcttggccttgagaataatcagcaggagtattgctgacgtgcaacaaacgttgcattaatgttgtcatgacgtcctgatgacttgttagtttactaattgtctgtgatggtgttcctggccaatgaattagcagcggaacatgcatctgagcacgattaaatttgccattgtttatccatctagggggatgtgtcgtggcggtttcactatgttcagcggtaatgacaatgacagtattgttcaatgcatttttgttttttagtgtctctagtacggtattaatcggaccatccagagccgcagcattacctactgaatctgctttatctaagccacttagcctcaagaaggagaaccacggagcgttagtattgggtaaatttagccattgctgccattgttctaccgtgagttggttgctttggttgacttcagtgggcagtgagtagtcggaaagtaatgcatgacgataaagcggagtaccaaaccctacagaagagaataggccaaattgatatccctgatgggtcagagcattaatcaaggctgatgatttacgtccagccaatattccatccagataaccagaagaaataccataaaatagcccgaatagggcggtatcattttgaatgccagtgctgaaatgctgattgaactgaatattggtttctctgaaatgagagagcgcaggcatattctcggtaatatctctattatccagtttatcaacgactagtattaacaggttgtatccgtttcctttgtcctgataggtcagatcattaagtggatattccactgttagtgccgcaggatcaccttgttgcataagtcggcgctgatattcttgttgatcgagcagaccatgtttttcaagaaatttacgtgctgtcattggataggagagcggcaggttagaacgttgcatggtaatcgggcgataaaaattagcatcagcccagatatacatcaaatgggaagctaaaaaagccgaaataaggacagcagccagcggcttaccaaaccgttgccgattcaggctgcgtagtttctgccaactccaggtaccaaataacatctgtatcagaaaaatgactggaatacagatgaacatgagttgccattctcgcgccagttccccttgatcaggattgatgactaaatcccaaactaaaggtgtaaggtgaaggtggaaacggttgtatatggcaatatcgaatattaacagcgtcagcccggctgtggcgaaaatggctgaaagaaacctgagtaggcgctgcgacatggcaataaatgtcagtggaaacagaaccagcaaataagcggcaaaaacaataaaactaaagtgcccaagccaactggacaaagcatagactcggccgaacagtgagctcggccagtcagaaacaaacaggtaacggctacctaatccaagactaagcagaatattaaatagggcaaaccaatgcccccagctaatcatttgggaaactttttcacgataacgctgacggctagtcaccatattttgtttacgttgtagtcttagttaaagaattaatgggctttatcttcgtttaccgaagatttaagcgcgtgtgcaaacgagtcagcaatatgtctgcgctgtgcaggcgatatactcgtattgattaaatttgtcaccatattgcccagtaccattagagaaaggtctgtcggggtacggtttctttccagaacactgacgagttctgttaataaacgttcaacgtgttcgtcactgtaacgagatgactgtggcatagatttaaacttcctgaactaacaaagcacattatcttaccgtatagatgcgtgattttctgctcttttgtggcaaattaattcacggttaagattatgttgcagtaatagcctatttttggcaattttttgatatctgtcagcaaattatagttgatggcagatgatgaaacgttattttcttttggggtttttttattgcagtcgtttgttatcggtgtttgaatgcgtgtttaaaaatgcgtgaagtcagccgaaaggagtagaaagaatgagtctgcaaatagaccagattgccttgcatcaattaatcaagcgtgatgaacagacattagatgtcgtgttgcgtgattctttgctcgccaccgatcaagtggtggaagatatgatggctgaattacaccgagtatacagcgcaaaaagtaaagcttacggcttatttaatgaagagagtgaattggcagaagcactcagacatcagcgtaaaggtgatgaagattttcttgggttcagtcgggcagcaacggcacgtctgagggatgaactggcgaaatatccgtttgctgagggagggacggtcctgttttgtcagtatcgctatctggcggtagagtatttattgattgctgtgcttaatagctgtaacagtatgtctgttaacgataatctggatttaaatactacgcattatctggatattcctcatgcagatattgttgctcgtatagatttgacggagtgggaaactaatcctgaatcaagccgttatttaacattcctgaaagggcgagtagggcgtaaagtttcagatttctttatggattttctcgctgctagtgaaggtatgaatgctaaagttcagaataaaggcttgctacaagccgttgatgattattgtgaatctggtgagcttaataaggatgagcgtcaagcgtatcgccagcaagtatataactattgtaatgaacaattgcaggcaggagaggaaattgaaattaaggcgttgtctcaggcattacctacatttggagagcagaattttcagcagttttctcaagagcaggaatatgaactggaagagagtttcccggcggatcgcagtacgttgcgtcaactgactaaatttgccggcagtggcggcggattaacaatcaattttgatgcgatgttatttggtgaaagaattttctgggatccggcaacggatactttaaccattaaaggcacgcccccaaatttacgtgaccagttacagcgccgtagcagtggtcattgaggctaaaaaataaataacgccgcaaatgcggcgttatttactcggcgtcccgaaaagctcggctgtggctaattaagcacgcaggaagtcaatgtgtgccagttttggtttaaacggatggcgctgtacagcctgcactttaactttagtctctttaccgtcgataaccagggtcagaacatcgctataaaattcagctttttgttccatgttgataacctgatcgtgatccagttcaatagaaactagctcttggttgccaccgtatacgatagctggaaacttgttagctctacgcaggcggcggctcgcacctttgccctgctctttacgtacttctgcattaatagtaaacattattttttctctttaagaagaaaataaatcctgctacaggcgacccagcagcaggttcgagatttggcttaacatttaacatagagctagtgtcaagcgggcggcattctagcgaaaaatggcggttacagcaaatggaataggccaatctgaatctattagtacaattcgtctgctcgtcggaaacgtccttggtaatcaaagattttttcacgaatctgccagaatcgaccttttttacgggcgacaacaaaatctggatggcgtaataaaggttgctggtgaacgatatctgaggcggttttccagttaaaaggtatcgctgaggcacgttgatgctgacgaagaaattggtgctcaaaggctagccgctgggccggtgttgtaagccgaaagcgttccgaaacatcagcgccatcttcatcgtaatagataattttcagccattcgcctttactgtcagtttcagggatgagttgcatgccaccacaacgcagtaccagtgcatctttgagcttcaatgcggctttcaacatatcgtcgggatcgaccagcacctcttggcaactgtggcaacgccgcgctgcaatatcattttctgcattgcaatgagggcagagtttaaaacgaaagcggaactcacattgacggcgtttgccatattgatcgttttcccaaccctgacagcggcggccaaagtgctcaataatttcaccgtcggaggtgcattttccccaaaatatattagcgaagttacagatagggcagaatacttgaaccggttggctctgtttatccggtttattgctgccaacttctggtgtgtagagatcgtgaggatttcctgcataatcgagaatcaggcaatcttttttgccgggaaataatcgtaaaccacgaccgataatttgctgatataaactaacggattcagtaggacgcagaatggctatcagatcaacatggggggcatcaaatccagttgtcaatacggcgacgttaaccatatagcgcaatcgctgagttttaaaggcttcgataaaccgatcacgatccgcagttgatgtatcagcactgactaatgcggcttggccgggagggagtaattgaaaaatctctttggcatgttcgacagttgcagcaaaaagcataacccctttgcggtcagcggaatattcaatgatttgtctgataatgtgaggtgtgatgcgtttttgtcgtttgatttcgtggtttaaatcagtgtcattgaagatgctttgctgactggagcgaacttggctgaaatcatattgcataacgggcatatctagccgttttggcgggatcaggaaaccgtgtttaatcatataacgcaggggcaattcatagatgcaatcacggaaaaaacagctttcatcaccacgggtcatgccgtgatagtgatagtgatatatccagccgatagccagtctgtaaggtgttgctgttaagccaagaatacgtagttgtgggttattttgccgaaggtgatgaataatttgctggtactggctgttttcatcatcactgatacggtggcattcatcaattatcagcaaagagaattgattatcaaaatgttcaagattacgggcgacagattgcacgctaccaaacacgacttttcctgcactttgtttttgctgcaatcctgcggaaaaaatatctgctggtaaaccgtatgcgcagtatttgctgtaattctgtgcaactaattcttttacatgagccaatactaatactttcccacgagctaattttgccagttcagcaataactaggcttttacctgctccagttggtaatacaatgactgcgggttcatgatggtgccggaaatgattaacggtggcatccacggcttcttgctgatagggacgtaaagtaaaagtcataatcgtttcgtaaccgaaaaatattcgcaaaagagtaacatttttcttatcaattttctgtggacggaggtcaaagtcagataattatctgattgagtgaaactatgactggttataataaatagataattgttgtttatagtaaacatagttatgattagctttgaaatcttttggactcatttcatatcttcttttttggtggctctgtgttgtagtgccgaggtagtgccaaaatagtagtggatcacgttcacttttaaattaattaatacaggtgtcttcatccatgcgattggataaatttttgtcacaacagcttggtatcagccggaatgacgtagggcgcgagttgcgtgcgggacgcatcactgttgatgatgagattgtaaaaaccggagcttataaattaactccagagcaacaggtcatgtttgatggttcattattggaacagcaacaagggcctcgttattttatgctaaataaaccacaggggtatgtttgttccaccgatgatccgataaatccaacggtgctctattttattgatgagccggcagcgcataaattgcatacggcgggtaggttggatatggataccactggtctggttttgctaaccgatgatggtcaatggtctcatcgtattacttccccaaaacatcattgtaaaaaaacctatctagtcacacttgaatgtccagttgcagcagagacggcagataaatttcttgcaggtgtgcaacttaatggtgaaaaaacagtgacaaaacccgcccagctagaaattctggagccgcaaatagcccgtctgacgattagtgaagggcgttaccatcaggtaaaacgcatgtttgcagcggtaggtaatcgggtaaccgcgcttcatcgtgagcgaatcggtgaaatcatcttagctcctgaattggagccaggcgagtaccgatcattaaccgagcaagaaattgccagtgtcacttttctttaattttggttttagttaattattttaaattattggagcaatatacgtgcaacaacaacgatcatcctatttgggactgattctaatccttgggctactttctatgttaatgccccttgccattgatatgtatttgccgagtttgccgactgttgccgaggatttcggtgtagatagcggacaggttcagatgacgctgagcagttatattctcggttttgctatcggtcagatggtatatggcccaatggctgacagtttggggcgtaagccggttattctaggtggggttactgtatttgccttggcttcagctgcgtgtgcaatggttcagaatatcgatgattttatttatatgcgctttttgcatggattctccgccgccgcagcgggtgttgtcattaatgcgctaatgcgagatctgttcaccaaagatgaattctcgcgtagcatgtcttttgtgatattggtaatgaccattgccccattaattgctccaattcttggtggcatgataatgatttggttcacatggcatgcgattttctggagtattgcggtgacgtctgttattactgtattccttgtcgctttctttataagagaaactttaccaaaagaaaaaagacaaaaatttcatcttcgtacaaccgtaagccagtttattatgttatttcgccagcgtcgtgtattttgctacatgcttgccagcggtttttcatttgcgggaatgttctcttttctcagtgcagggccatttgtttatattgagttaaatggtgtttcgcctcagcactttggttattactttgcgcttaacatcgtatttctgtttgtgatgacgacaatcaatagtcgctatgtccggcgctttggtgcgttgaagatgatgtattttggtttgagtgtgcagtttatgatggggatctggttgttactgtctaccgccctcgattttggctttactgctctggtcatcggtgttgcagcttatgtatgtggtatcgcaatgattacatccaatgttatggccgtggttttagatgattatccacatatggccggaacggtgtcttcattggcaggtaccgttcgttttggtattagtgctttggttggtatattacttgccatgttacctgcacgtaatgcctggccaatggttggttctatggttttatctgttattttggctgtattgcttattatatacgcaaaaaagaggcgataagtaaaaacagaaggctgttttcatgtgcagccttttccttaaagagaaaattagggtaagcgaaaaatatttttgatgatgttgtctggttataattttatatgagattgttgaagagtttttttattctaaaatatatatctactttcgttgatatattcttgattgacagaggtaagatttaatattatttattaaagataacccattagaacagaaaattgtgctattttttgttattctaagatttgccattaagtaacgaggttgtaatagtttggtggtattagctgcattttttgtattactaacattatcattaaaaacgataatgttagtaaagagaatattttccctgaatgttcagggaaattgaataatgggttatgcataatagctataccctatggatttcaagatgcatcgcggcggcaagggtgcgagtgcagccaacaaagaagcaacttgaaagatgacgggtatatatgatgatgatattgatctatttatggcaaggtgaaactgttgttgcttcattatttttttattattactgttgcgtatttgttgatttttattttcttgttgagctgagcagctaactttctactataaggaaattccgaaatgttttgcaatgtgaatgaattgttattgatgcattgatagtgattataagtaattgttgtatttttgttaaattaaaaaatattaaatggcgttatcattaggttgttattaattataccttataaaacacattgttatctatttgtttttacagttcttatttgatttttatgttaaagtgttgagttgaaaaaataaaatatgtaaacaatcattaaacataaagttggatttttgcataaaaattagttgagttttctttaaaaaaagtataaatatatgagaaatgagagattgatctcactttttctaaggtgaaatttggaattaatgtaatactataaacacaaatttaacttttcgtttactttttttgggggttagttattcggttttggcgagtagaacacctgaagatagccgctaactttaacttttgtatctatgttctttcaggtaggaatgattcgtgaataatattcagctttcggtagtacatcggctgccgcaaagttacaagtggtcacccggttttgtgggtatcaaagttgagccgcttccggttgatgaagtgaatgcagaaagcagcctgatggggttgaagttactcagccacgaagacggggctgcgtggaatgttatgcaaaaattacagcaatcgcttgctgatatgcaaattggaagcactgtgattgagttggaaggtcaaccgtgcttatttattaatagtgaagatgaaagtgcggttatgtgtcgtttgaagacacttggcgctgccattgctgaaaagataactgcgctttatccattttgatatatcccctatggatttcaagttgcttcgcgacggcaagggaacgaatccccgggagcatagataactatgtgaccggggtgagtgagtgccgccaacaaagaggcagcttgaaagatgacgggtataaacgcgaaaagcgcttcctttgatggaggcgcttttttgtgggcaagggaaaaattttcagcttttagccgttaggcattttttagccattaggcacaatgctattactgatgactcggcgaccgctataataacgtttgctccagtatgtgctgcttaatctggaaacgattacaccattgctagtagaggcgtgaacaaattggtcattgccaacatagatgccaatatgcctggtacgggcacctgtcttaaataaaactaaatcgccagggcgtaatcttgaacggtcaatttttttgccaatattctgttgttcaaatgttgaacgcggcagttccataccaaactggtcacggaaagtacgttgaacaaagccagaacaatctataccgcgtttagtaacgccaccgagtcgataggcaacccctttccagccattgtattggctaagaattttagattttatgtccagattgcgaacgagtgcttcgaattcatcctgagacgcttgaagtaagaagccgttcttaccgtttactgcatgcgtatcagtttgtgtgttacgaaaccttgatgaatctggtgagctgcacgcggataaggtgatcgctacgaacagcgcgggtatcagccgcgtaatgtatctcagtgccggttgagacttgaccattatttttgttttcccttgctatccttaccttagttggtcgctattattgaaaaatatcaaacacttcaaagcctggtgttagaaaaaacaatgagtaaacaacgcgcttagtaaaaaaacgcgtctgatgccacgttttataacgatatttacaataaatgttattcagcttgagagtacagaaacaatcaggaaaaggcgagtatttaatgacataatttacaaaaaattagatttctaagtaggagagatcaggtgtgttgctaatttatgtgggttttatgaactattgggaaggttaaataccttcccgatatgattcagtaaaaagagtttatggaaaagatcttaaattgggcgaccaatttgcggcagattcttatccagccagttaatcattatgtcacttaatggtgttaatagtagccaacttgttccgatgagtatcagagataaagaaccgactgcaatatcagtaaaccagtgagcgcctgccattatgcgaggtaacgcaaatattaccataatgagtaatgcaatacagaatgctctgcctgaaatatatcgaagaataaagcagctgaaaatcaggagcattaatccgtgatcacctggaaagctatcgcttgatgcatcttttgttaccagattggtcatttcgctaatacgattgatatgatcgaaggttaatgttgggcttggacggacaacagggagtaggtgaccgatttggttaagtataactgcgcttattatcatgaccaaaccaatcatgaataatctgcgtttgccatcgtaattctgtttacgaaaagcgttgtaatacagcaatcccatacataaaagtgaaatgacatcgaaggccctgatattcacaaatgctacaaattctgtgaatgttgagcctgatgttaatttctcattaaagaagtagaagattgcagagtcgatcttgagccagaaaccatgatgctctggtaaataccaggagagaaataaagtgatccctaacaggttcagtataaatatggcaaatgggtgactgcgtgtcatgggagacctatttgttaaaaataagataagtggtaactaaacttacaattatgtaggttaatataacaaatattgagtaataatgtcaccgctcttaatcataagttaatttgttgtttttttatctacttttttgtgcttttcctgcatttttttatttactttggtaactattcctgcccaattctatggattttattgagtgatattggggtgtttaaggttgtaaattcttaatttattgagaattacttctgataattctaatattataagatataaatatcttaatcagttttaatcgctaaaaatcataaataaacaatgaaaatagccgttaccaatatatagactcataaatttttccgatttctagattgatttcatttttggaaattgcagcgaatgatgctgttttatggtggaggctgtatgtctatgtttcgggttataatgggttgtttttttctgatgatttctggtcttgtcaatagtgagccagaaacagcatcaaatacaggggttattcgcttttctggtgcgatcgttgaatcaccgtgtcgttttgattggcgtgataactgggctgacaccacgtgttggcgaaaaggacataagattatccaacgacgaaagctcgatttgcaaaatgatatttatttttatttaccacaccaaatcggtgtaaccgagattaaatggataaaaggaaaagagaaaattggcgttgttacaattttctataattgatgttaagaaaaattttataggttatttattcaatgtttaattgaagaagcatcggggttttatctgtcattgctaaaatgaatgagtgacagagttatattttatttgggagtttaaattatgcccaaatgctaatagaaagtagctgattgatttaatgaatggaataggtgaaaagtgagttaccctgttttatacccgtcatctttcaagttgcctctttgttggctgcactcactcaccccggtcacatcgttatctatgctcccggggattcgctcccttgccgtcgcgatgcatcttgaaatccataaggtatataccgggcaactcagaattagctaatattgttaatcgcaacgtcccatatagcggcgttctgcaatatgaatacggattctttccccgctactgatatattcaggtacttgcacggtgagtccggtgctcattttggccggttttgttcgtgcactggctgaagcgcctttaattccaggggctgtttcttcaataaccatatcgactgtttgtggtagttcaagggcaatgacttgtccctctattgtcagaacttgcataccaggcaggccaccttcaggaataaataataactcttcttcgatttgttcctttttaaagtgataaggtgtgaaatcttcatcatccatgaaaacatattcatcaccatcaatgtaggaaaagttaacgctacgacgagttaggctgatcgtatcaaggatatcatcgcctttgaagcgttcttccactttctgaccggtgcggatatcagtaaagcgcattttatataatgtgctagctccccgggcgcttggtgcttgaatatcaatatctttaaccagcagtaacttaccattataactgacggcgctaccgcgtttaatttcgttggctttagccatatgtaaccttccataaaaccataagagaataatcggcgacaaaattactcgcagtcaagacattaggcaagtagggattaaaaaaccccactgtttttttacattggggttgtagtaagaatgttttatatgtcaatgatacacaggtaataaatcaagagaggacaaaatatgggctatagcatttatcaaaccaaacagaatgacgaacccaatgaggaatttccctcctggtgctcggtaactggcttcagggaagcgctggcgacttgccctagccatcagtgctggaataatgacagcccagatggttgcagcgaatccagcaaagccaatggcatatagaaaaccattggggaacagtaaagctagcgctgttggcggaataaatgtcactaatgcagatgttaaccggccggtgttgttatctttaaaaccgaagaaatcggctatgtaatcaaatagccctaaagagacaccaagaaatgaacttgctaatgccatataagagaaggcatttagaagctggtgaacggttttgctgtttgttgtattatccatgtgttttaataaatcaccgatattcccgccatcagcaataatctgtttgaatgcttcgcggggaatatttccctgaatgacatattgccataggatataaatagttaatgcgattaatgtacctaataacaggctgcgaataacggcttttctatctttatgataatattttactaaacttgggatgttaccgtgatatccgaatgaaacgagtaaatagggtagagcggttaaagcgtaagatatataacttgttgccgtgtcgtttgatgtagtatccgtctgattaaacaaaatgacatatttaacttcggtaaacatgccgccaacggacataaaaaaagtaataaccataccgccgatcaaaattgtgctcaaacgatcgacagcttgagtcgataaccagacaataaatgcaacgataaaagcgaaaataaagccagcatttgcctgtgatatcgaaataatatttttaaaattgtgggcaataattgagccacccgctgaaatataggcgtaggttaatatataaagcacgaatgcaatagagataccattgattgcattccatcctttaccgagtaaatctttagtcatggtatggaagcttgcacctgatgggtagttcaggttggtttctagtatcatcaagccggagaaatacatacacacccatgtgtaaaccagcagaataattgagccagtaaaccagacaccggaagttgccacaggagtagagaacattcctgcaccgacagcagttccggcaatgatcattgcaccacccagtatgggagggcgctttaaactctggggtgtctcagtggacatattaactcctactggtatattgtttctttgtactagcttaaagatacattcttgtctatagagtgtaaatagatgccataaaggattatttgaaattgaactaacataagttagttcattcagtaagataaaatttattttcttgccacatttttattgcattccggctagcttcaaaatgaggttcaggaagattattgggatcgcaccacataaattgttcacatttttctggttccatcaattttggttcaccacctggatgttttgccagtaaacatactgaaatagtatgttttccttcctgttggtaagtttgaagattattacaaataccgtagacctttggtgattgaatcgtcagacccgtttcttctgcaatttcacggattgcacattgctcaaaagtttctccggcatcaacatgaccaccaaagattgaccagtatggagcatgtttactgctacgttttccgagtaatacttgaccacattcgttcacaataaccacaccaacacccacaatgacagacattttgtttattcctttcatttaaatttcaataaattagcaatctttttgagaaaaattcaatgctattcttatccggaaaccaatttaagacaacgatcaataaagtacggaatttaactgaaacgattcaattttagtgatataaatagaactgaaaattcatagtaatgatgattattatctatttaggagacatcgggcgaaatgagccgtagagttgccactatcaccctaaaccctgcttatgatttggtaggattgtgcccggaaatcgtcaagggagcgatcaaccgagtgcaagccgctggactgcatgctgctggtaaaggcaataatgttgctaaagttttgcgtgacttaggtattgatgtcacggtgagtggttttttgggtaaggaaaatcaggaaggatttcaacagttcttcaatgaaaatggtatggtaaatcgttttcatttagtaccaggcagaacacggattaatgtcaaattgacagaagaaagcggagaagtgacagactttaacttcactggtttttatgtcggtgaagctgaatggtcgggatttgttaatgattcgctttcatggcttggacagtttgatatggttgttgttagtggtagcttaccggctggtgtctctgctgaatcgtttactgactggatgacctgtctacgtcagctttgtccttgcattatttttgatagcagccgtgaagcattggttgcagggttaaaagcatccccttggttagtgaagccgaatcgccatgagcttgaagtatgggcgggacgtctgttacctgagttgtccgatatcatcatagcagcacatcaacttagggatcagggaattgctcatgttgtcatatccttgggtgagcagggggcattatgggttaatgcgtctggagcatggttggcgaaaccaccacattgtaaagtcgtcagcactgttggggctggtgattcaatggttgggggcttggtttatggtttgctgatgcgggaatccagtgaacatacgttgcgattggcgaccgctgtatctgcacttgccgttagccagcctaatgtgggtatcagcaatcgtcctgaattagctgccatgatggccaaagttgaactgatacccgttagataatgcgttaattaaagaatcattaattttgttgtaatttcagccaggcaatttcttgcggccaaatatctgggtttattgtttcaaggatgagtggaataccatcaaaacgagcatctttcataatataactgaaaggtgttttaccaatatttccttctccaaggctatgatgtcggtcaacacggctggcgaattcacttttggcatcatttaaatgcattccgcataaatattgaaagccaacaattttttcaaactgttgaaaagtttgttcacaaacatcgtttgtacgtaaatcgtagccagcagcaaaggcgtggcaggtatcaatacagacacccactcggtttttatcttcaactccatcaataattgctgccagatgttcaaatttaaaacccagattagtgccttggcctgccgtattttcgataacagcagtgactctctgggttttattgagagcaatattgatagattccgcaatacgcgccaggcatttatccacatctactttattgagatggctgccaggatggaagttcaataaatcgatccctaattgttcgcaacgttgcatctcatcaataaaagccagtcgggatttttccagagcttcactttctggatggccgagattaatcagataactatcgtgagggagaatttgtcggctaccatatccataacgttcacagttttctttaaatttatcgataacgtcagcggctaaatgtggagcatgccactggcgctgattttttgtaaatagggcaaaggcggtagcttttagttcgtgcgcccggataaccgcttgatcaactccgccagccgcgctgacatgtgctccaacaaatttcatatttttctccttcttgctttctttacgtcattatggattatggcattgttcaatcgctcaatgaatcttaagaacggaaaagtatatgttgctgaaataaaatttctccgagtggattctgatcagccaaacagatgttgaatgccaagatttattaaaagaccgcccgccatcagccatacaaacaaaatgagagctaataaaatgggtttaaatccggcctgacggatggcgctcacatgagtagttaaacccagtgcccccattgccatagtaagcataatagtatcaatattaatcagagaattaactattgcagcaggaagtaaattgaaagaattaaaacccgctattgcaataaaaatcactgcaaaccaggggatagttattggtgttttctcctgatggtttctgccatttttagtgtcggcatggttaatataacgggataataacaacaggaatggtgctaacatcataaccctgatcattttactgataacggctacgttttccgtttgatcgctaatagcatgcccaacagcaacaacttgagcaacttcgtgaagggtggagccagtaaagatgccgaaagtttcctgagtaagtggtaaccactgataatgctcattgagttgataaaaccacggataaatgaaaatagcgatagtgccaaagatgacaattgtcgagaccgcaacagcaactttactggcaggggcattcactactggctctgttgccataatagctgctgcaccgcagatactgctgccggcaccaatcagtattactgtttgctggtctaatccaaagagtgatttgcctagccaaattgcaataaagaaagtggaagacaacatagcagcatcaatcagaaggccggtaatgccaacatcggcaatttgttgaaatgtcaaacggaagccataaagaataatacctgcccgcagaagataatgttttgagaaatgaataccctcatcacaataaggtttgagtaaaggatagacagtattaccgacaatgatccctgcaaggatcgccagtgttaatgtacccagtcccatattaataaaccacggaatatttccggcatagattgaaattgcagtaagtattgccgctaatattaacccaggtattaatttcataccgggaatggatgattgtttgctgaattttttggcatgaatgtcagacatagatgtttctcacgttgcttatatgttttaaacataagcatatagcagacttgtttatcattaaaattgataatatttttatatataatcgaaaaaattggtaagaaagtagatttttgttaagttgtctattgccgtataaaattaaaacaagctaactttgactgacaccatattttgcggggcaatatgcacatcacattgaggcagttggaagtttttactgaggtattgaaaagcggttcaacgacgcaagcctctcagcaattggcgctatctcagtccgcggtgagtgcctcattaacggatctggaaagccaacttggcgtacagctttttgatcgagtaggaaagcggttggtgacgaatgaacatggccgcctactctatcccaaggcgttggcattgctagagcaagccggggaaattcagcagttattcaaacaggagttaggagcgttacgtatcgctgccagtagcaccattggtaattatatgttgccggaaatgctggcaaattatcgtcaggattttcctgatacgccgctagagttaaatatcagcaatacgcaggatgtcatcaattctgtgctggaattccgtgttgatcttggtttgatagaaggttcctgccatagccctgagttgataactcagctatggatggaggatgagttggttattttttcttctcctgaaaatccgctagctgaacaggatctaaaattggatgatttagttaaggcatcatggatattaagggagaggggatcgggtacaagagaagtgctggatcatctgttgtttgtccatttacccgggttcaagattttgatggaattgggaaattctgaagcgataaaacatgcggtcaaatttggtatgggtatcagttgcttgtccagacgagtcgttgcagagcaattgcaaaatcgtactttactggagttaaaagtgccagaattaagacttttcagaacattgtacctgattcatcatcggcaaaagcatatgtctatcgcactgcaaaaattgcttagttactgccggtaaattttgcgttctgtttaaaatccaaaattagctgtgttacttataattttctctaaattatgaaggtatcttataacagcgcttcctcgctattttgatagtgaggatttgttacaatccgccatcagatttattcgcagctaacaggaacagaatgtctcaacaacaaaaaagtgtttcccggaaacccgcaacgcaacatttgcgacgtgaattgaaagctcggcatctagcgatgattgccattggcggatcaataggcaccgggttattcgtggcttcaggtgcgacagtttcacaagcagggcctggcggagcattactttcctatgcattaattggcttgatggtttatttcctgatgaccagtttgggtgaactggccgcttatatgccggtttccggttctttctcaacttatggttccaaatatgttgaagaagggtttggttttgccttgggttggaactattggtacaactgggcggtgactatcgcggtggatttggttgcagcccaattggttatgggttattggctgccggatatgccgggttggatctggagtgcgttattcctcgcgttgattttcctactgaattttatttcagtgaaaggatttggtgaagctgaatactggttctccttgattaaagtcagcacggttattgtttttattgtggtcggattactgatgatagccggcatcatgaaaggggcagaaggtgctggatggcataactggactgttggtgatgcaccttttgccggtggtttctctgccatgattggcgtggcaatgatagttgggttttcttttcagggaactgagctaattggcattgcggcgggtgagtcaaaagatccggcaaaaaatgttcccagtgctgtacgtaaggtattctggcgtattctgctattctatatttttgcgatcctgattatcagcctgattattccttatactgatccaagcctactgcgtaatgaggtcggtgatatcagtgttagtccgtttacgttggtatttgaaaacgctggtttgttatccgccgcagctatgatgaatgcggttattttgacggctgtgttgtctgcgggtaattcaggtatgtatgcatcgactcgtatgttgttcacattggcaaaagagggtaaagcaccgaggatttttggcaaattatccaaaggtggtgtaccgcgtaatgccttgtatgcaacaacggtggttgctgcgttgtgtttcctcagttcaatgtacggtaaccagaccgtctatctgtggttgttgaatacttctgggatgaccggttttattgcctggttggggattgctattagtcattatcgtttccgccgtggttatgtcgctcaggggttggatttaagtaaattaccttatcgttcaggatttttccccgttggcccaatttttgcgtttgttttgtgtctaaccatcacattaggacagaattatcaggcatttctacaagataaaattgactggtatggtgtcactgcaacttatgttggtattccactcttcctgttgatttggtttggttacaaattagctaggaaaactcactttatcaaatatagcgagatgaaatttcctgatatcgagaatcagtgaatgtaaatacgttaaatggtgattaacaggccggtaggaatctttgaaaaaattcctaccggcctggttttataccctatggatttcaagatggatcgcgacggcaagggagcgaatccccgggagtatagataacgatgtgaccggggtgagtgagcgcagccaacaaagaagcaacttgaaagataacgggtatatggtttttttaattcgattcacgattaatttattattatcttaatgttttatttatttgagtagataagccgtttttgataagaaattaaaaagatacccctgttttgtgatcaaataggtattttttatttttcatagtgttaattcatacaattaatcacgtaatttaccaaaatttgtgtagatcatattgataagtattctcatttgtcctattgttagtgccataattattaatatgaaagggctaacaaaatgaaatttatgtctcgatccatagcaaagagtatcagtgtcggcctgttagcgggttcggcagttatggcaagcttcgcatcatgggctgaaacggtcaccgatatcgttggtcgtactgttgaagttcctgagaatgtaaatcgtattttgttgggcgaaggccgtttgttccacgctatcgctttgcttgaaggcgataaaccactggcccgtattgcgggttggcaaggtgatttccgcaaactggacccacagtcttacgccgtctataaagctaaattccctgagattgacaaagttcctttgattggtaataccagcgctgagagtgtcagttctgaaaaagtattaactctcaacccggatatcgccatttttggcttgtctggtcatggccctggtaaagacagcgaactggtcgcccaacttgaaaaggctggtgttccggttgtatttgttgattttcgtactgagccgttaaagaatacgctgccgagcattcgtatgctaggtaaagtactaaatcgtgaaaaacaagcggcagaatatgccgatttttacgagaaaaatgtaaaactagtgactgagatcaccaataaaatcccggaagagaaaaaacccaccgtatttatcgatttgagagcgggtgcttttgaagactgctgtgcgactgccggtgatggcaatatgggtaactttatcgatttggctggcggtaaaaacattgctaaaggtgttctgccaggcgcacttggtaatatgaacctcgaaaaaattattgcagttgacccttatatttacattgctagtggggcaaaagcgccagacagtaatgaaccaggtgtaaaactgggtgcgcaatctacgtctgaattagcaaaagccagcctgaaacaaatgactgaacgtaaaggtattagcacgttgactgcggtcaaagagggcagagactatgcgatttggcataactactacaactctccctataatgtggtagcgactcaggtatttgctaaatggttctatcctgagaaatttacagatttagatccacagaagacactgaatgaattacacagtaaattcctggcagttgatccatcaggggtttattgggtcagtgaaaagtaatcagtaagtcaggtaacgggaataatgagtgctactaccgagccgatgccaatggtgaaacaacaattagatgacagcagtgtaaaagcccattaccaatatattttacgccgccgtattgtgatgatggttttcatcgtgctgattattggtgtttcactggtattagattttacgataggtccatcaggtttatctttgtcatctctctggcagactttagtgtcgccagagagtgtggatgcggggactcgggtaattgtttgggatatccgtttaccctatgccctgatggcggtagtgattggcctgtcccttgggctggctggcgcggaaatgcagacgatcttaaataacccattagccagtccctctactttaggggttgctcaagcggctgcatttggtgctgcgttggcgattgtatctggtattggtatcccaggcgtgcctgatcagtggttcatctctgcgaatgctttcattttcgctttgttggctgcattggtactggatacgatcactcgttggacacgcgttgctacgtctggggtcgtattatttggtattgcattggtctttacctttgaagcattggtttccatgatgcagtttatcgcaacggaagatacccttcaggggctggtactttggacaatggggagccttgccagagcaacctggataaaactgggtgtgatgttattggtgtttgcagccatttttcctatttcaatgatgaattcctggagactgacagcgctgcgtttgggtgaagatcgtgcaatcagttttggtattgatgttcgtcgtctgcgcttggggacattattgcgtatcagtattcttgccgctttagcagttgcatttgttgggccaattgcttttatcggtttaattgcgccacatattgcccggatgatgtttggtgaagatcatcgtttctatttaccagccagtgctctaattggtgcattggtgttgtctatggcgtccatcgcctcgaagaacctgatcccaggtgttgttattcctgttgggatcgttactgcgttagttggggttccattcttccttagcataattttacgtcatagggcgaatatatgaatccgggattagccattaacaatttttttgcaggttatccgaaacattcggttattgaaaatctgaatattgctccgttgcctcgtgggaaaattacggtactgttggggccaaatgggagtggtaaatcaacacttttgcgttctttggcgggcttaaattgtgcaagaggtcagctttggcttgatggtcaagatttgatgaagatgagttttgtccagcgatcggaaaatgtggtttatttaccacagagcttacctgctggtgttcatttgcatgtactggagtcaattatcgttgctcaacgggcatctggagggcgtcattctgaaaccagtgaagaagaagtgatgttgctgttacgtcagttggggattgagcacttggcgttatgttatttagatcaattatctggcggtcaaaaacaattagtcggattagcacaatcattaattcgtaaaccaacattattattattagatgaaccacttagtgcgctggatttaaattatcaatatcacgtaatggcgttggtggcacaagaaacttatcggcggaatatgattactgtggtcgttgtgcatgatattaatatcgctttgcgtcatggtgaccatgtattaatgttgcaaaaagggcatttaattgccgagggaattcctgagcaggttattacgccagatagtctggcacaggtttatggtgtcaaaggcagaattgaacgttgttctcagggcattcctcaggtattagttgatgggttggtttcaaagctagcgagtgagaattcattttaacttataaaataataaaactacacagaggtaaatattttatcctcgttatttgagcacatgttgattatccatttttatagataaatttatagataaataaagtgtaattatatctcttggagaatcgggaatgggtgtttttaataaaagaaaaatcgcgttaggtattattgctacaatctcatctggctcagtttttgcggctagtagcagtaatgacactattcttgttactacggcagcaggttttcaacagaagattgaagatgcgccagcgtctatttctgtggtgagccgtgagcaattggaaactaaggcttatcgtgatgtgactgatgcactgaaagatgtaccgggtgtcgttgttacaggtggtgctagcagcagtgatatcagtattcgcggtatggcggctcaatatacaatgattttggttgatggtaagcgtgttgatacccgaggtactcgcccaaaccgtgataattcggggattgaacaggggtggttgccgccattggccgcgatagaacgtatcgaggttgttcgtggtcctatgtcttctctttatggttctgatgcgatgggcggggtgattaacatcattacccgtaaggcacagaaagagtggaaaaccagcttccgcgctgatggcactttgcaggagcgttctaaatcaggtaatagtcatcagagtagtgtgtatacttcaggtccaattattgatggattattagggctgaaagtgagcggcctgtattctcaccgtaatgaagataaatttatcggtggttttaacaaacaggaaatgcgtaatggttcagccactttctctttcactccggatgagcagaatacttttgattttgaagcgggacgttatgagcaagatcgtgattctactgtagggaaaacaaagacaagtagttggcgatctccaggtaatagtgaaagtcgatataaaaggaataattactctatcacccataatggcgtttacgattttggaacgtcgacaacgtacttccagcgtgatgaatcacgtaaccctggtcgtgatatgaaatattacgataatctgttcaatactcataccgtatttatgttggatgatcattcattgagtataggtggtcagtatcgttatgaagatttacgcgatgaagggaatcaattagcttctgctaaaaatatcaataagctgaaccgttggagttgggcgttatttgctgaagatgaatggcaaatgaccaatgactttgctctgaccggtggtatccgcatggataaagacgaaaacttcggtgaccactggactccacgtttgtacggtgtatggcatgttgatgaacaatggacgattaaaggtggcgtttctacaggatatcgttcaccagaattacgtcaggcggcatctaattgggggcagattacgggtggcggtggtgatccagcgattatcgtcggtaatccagatttgaaaccggagaagagcttcaatcaggaaattggtgttatctggaacaatcgggataactttaatgtcggtttaacaatattcaacactgaatttaaagataaaattactgaattacgtcgttgtaccgatccaagtggtaaatctcagggcaaatgtgttattgatggcactgcttataaatttatcagtgaccgtgtgaacattgataaagccaatatgcgtggtgtagaagcgacgatgaactgggatattgttgataactgggtattggctgcaaactatacgtatactgattctgagcaaaagagcggtaacttcaaagggaagccgttgaataagatgcctaaacatatggcgaatgccaccttaaactggcaggcttcaccagaaatgcaagcttggacccgtgttaactaccgtggtaaaacgtcgaattatttatcacgtacctctatggggacgggaacaccgtcttatacctttgtggatatcggtgtcagctattatctggctgaaggtttacgcttggtagggggggtatataacgtctttgaaaaacaagtgactgaagacacccatgatatagtcttggatggccgtcgttataacattggtatcaattacgacttttgataatgcgttctaactaactataccctatggatttcaagaggcatcgcggcggcaagggagtgaatcctcgggagcataggtaactatgtgaccggggtgagtgagtgcagctaacaaagaggcaacttgaaagatgacgggtatattttataatcctccttgtttgtcgctgataagggggatttttgcttttttgcttatacctgtaaaactgaatagaaatccgttttgtgttgtgttaaaacttagccatgtcaaagaaatgtatatgacaccgttaaattccatagcgtcatcaataagtgtggtaaaaaataatgaacttttagtgcggcgagtattgctatttcaggtcttcaagtgcagaattcgcccactggaaaataactgatgcgtttatatgtgtcggttattttttttgctttgacttattttttactataccagaggccggactctgagccggatagataattggcccacgatcaaccgcgacgagaatcggttgccgtaatgaggaacgctaatatggagcaattatttcctttcgcacttgtgccaatcggcacatgctgctgcatcgatgactatggagcattgagctctgcatataatccagcctctaattctactgcctataggcagaagcgaagtcttcccagtaactatcgattaagtagtgttataacacgcatcggagttatgggaggtttcgctcatgtctcataatactgtaatcactctaggcaccaaccagacgggtgctaacaatcgtgttcagctcagaaaaacactgaccttggttcaggtagtgatgatgggtctcgcttatctgcaacctatgactatctttgatactttcggcattgtttctggtttgactgacggccacgtagcgacatcctacgcgattgctttgatcgcaattctgtttaccgccgtgagctacggaaagttggtaaaacgtttcccatctgctggatctgcatatacttatgcgcaaaaatccattagtccgcatgttggctttatggtgggttggtcatcgctattggactatatgtttatgccgatgattaatatcttgttagcgaaaatttatcttcaggccatttttcctagcgtagatccgtggatcttcgttgtgggttttgcattactgatgacagcttttaacctgcgtggcattaacgttgttgctaatctcaacacggctattgtcattgttcaggtaaccgttatggttgtatttgtgggtttactgatccacggtgtgtacaacggagaaggagtaggaactttatggaatgcgaaaccattcgtttctgaagatgcccatttaatcccaatgattactggggcgacgattttgtgtttttcatttctagggtttgacggcattagttcgttgtccgaagagactccgaatgctggtaaggtgattccgaaagcgattttcctgacagtattaattggtggtgttatcttcattgcggtttcttatttcttgcagctctattttccggatatttctcggttcgagaacccggatgaatctcagccagaaattatgttgtatgtagcaggtactctgttccaatccattattttggtgttctcttgtgtcactgttttggcttctggtatggcggctcacgcgggggtttcccgtttgctctatgttatggggcgcgatggtgtatttcctgagaaaatatttggctatgttcatccaaaatggcggactccggtaatcaacgtatcgctggtaggcatcatcgggttatctgcgattacctttgatctggttactgcaacagctctgattaactttggtgcgttgatagcgttcacctttgtaaacttatcagtcatttctcaattctatatccgtgaacgtcgtaaccgtacattaaaagataccattaatttcttggtattacctgtgataggggcttgtactgttagcgtactatggatgaatctggagcaaagttctatggaattggggctaacttggggagcaattggtctggtttatatggtattcctgactcgtcgcttccgtcagccgatgcctcaatgctctgaaatggtttaatatttagcaaaagaataatggcgccgaatttggtgccattatttttgctatgcagctaattttaccgtaatagttaaggaaaaggagcccaagaaaaaaaacagcgaggtcgcttacagataagaaaaatttcaaggtaaacggagaaaaacaatctatgctctgagaggtgattgtatattaaggaagagactatgaatgatgcaaagacctctcaaaatcaacaactcattactaccctgaccaatattgtcggtaaatctcatatcctgactgctccccataaaactgaacgttatcgtaaaggctttcgctccggccagggagacgctttagccgttgtatttcccggctcgttggtggaacagtggcatgtgtttaaggtctgcgttgaagcagataaaattatcttaatgcaggcggccaacacgggtataaccgaaggttctaccccgaatggtaagggttacgatcgtgacatagttattattagtacgctgcgcatgaataaaattcagattttaaaacagtgtaatcaggtagttgcgttacctggcagtacattatggcaacttgaacgtgcgctcaagccgctgggacgtgaacctcattcagttatcggttcttcctgcattggcgcttccgtgattgggggcatctgtaataactcaggcggttctttagttcatcgtgggccggcttataccgaaatggcattgtatgggcgtgttaatgagtgtggtaagccagaattgattaatcatctgggtatctatttgggagaaacaccagaagagattctctcttgtctggaagaacagcgttacagtgatcaggatgtagaacagggtcagcgtaaagcatctgatcatgaatatacccaacgagtacgtgacgtcgatgctgatactccatctcgtttcaattctgacgagcgccgtttattcgaagcttcaggttgtgcaggtaagttggttgtgtttgctgtccggctcgatacttttccggcagagcctttgtctcaagtattttatattggtaccaaccaaacgggcgtattgacggaattgcgtcgccatatattagcaaattttcataatttaccaatggcgggtgaatatatgcaccgggatattttcgatattgcggaaatttatggtaaagatgctttcatcatgattgataagcttggcactgataagatgccgacttattttactttgaaagggagaatggacgctattttcaaccgagttccatttttacctgtcaatcttattgatcgcattatgcaggggttaagtcgtttacttccttcccacctgcctaagcgtttgaaagaatatcgtaatcgttttgagcaccatttgatattaaaaatgtcaggtgatggggtggaagaggctagaagctggttggaagactattttagccgggtggaaggggatttctttgcttgtacgccggaggaaggtgctaaagcgttcttgcatcgtttttccgctggtggttcagcgatccgttatcaagcggtgcatagcaacgaagtagggaatatcctgtcacttgatatcgctctgcgccgcaatgatcgtgaatggtttgaacaattacccccagagtttgatgatgtattggtacataaactttattgcggacattttatgtgctacgtgtttcatcaggattacattgtgaaaaaaggggtggacgtacaggcattgaaagcaagaatgatagagctgcttgataaacgaggagcggaatatcccgcagagcataatgtgggtcatctatatcaggctaaacctcaacttaaggctttttatcggatgtctgatcctactaatactctcaacccaggaattggaaaaacatccaagctgaaaaattggggcgaaggatcttaatgtcaatattctcagtagtgacaatgctatgctagtactcagtgtaaagattgatgagaaagttactcttatcaaaaaggcgagtatatatgactcgccgttttatatttattcacgccccgcttaattatccagccagttgcactgcatattccatgagtgctttaagttgacgacatttttcttcgttgccttgatattcagtaaagagctgttcaattataaagaaatattcactgagtttatcctgagtgaatatttcttgacgatgacgtaaccagtgttgttgttcatcataagtcagagtcgtagggtagtttctggctctatagcggaataacagcgttttaatccgtgagtcttgaaaagtcagatcgagtgccggtaaattctgaggcagagtctcacggataatattcattgctgctttatcggcactgctaaaaaagccatcatacagcttagtgtcaacattattggattcagggaaaggttctgcctctgcaaatagctctacaactttttctctgatttgtggattattttgcagaatagctagatttcttccacaataatcacgatccaaaccgatacgttcagcgtcttctgtgcgcaaagtattatcgggggcgactatcgggcacttattaatatgaaccagttttatcgggactggtggttgatctggttgcaattcatcatggcgggtatatagacgttcacgcaatgcatctgcatccagttccaataatggtgaaatatccccagctaaatcgcacacaataacggcattctgattggctggatgccaggcaagaggtgcaaccaaactgaggttgctgcgagcagcaccaaacatcccggaaacatgaaccagcggtttcatttgggggatatcgatgagagcgttaattttctgcttatttcttaactgaaagaaataattgaacatccttggctgtacttctttgagtaattttgccattgcaattgtggcgtagacatcggacatagcatcgtgagcatgtgaatgttcaacgccatttgccttggtcagatgttctagtttaaagctgggcagaccctcttcattctcgggccagataataccttcgggacgcaaggcataacaggcacgtaatacatcaagtaaatcccaacgggaattacctttttgccaactataagcgtatggatcataaaaattacggtaaaaaatattccggctgacttcatcatcaaaccgaatgttgttataaccgaggatacaactgttcggtacactgaatgcattatgaatctggcgggcaaattccgcttcattgacccctttttctaatgcaatttgaggtgtaatacctgtaatcatgacagcttctggttgtggcagataatcatcagcaggtgaacagtaaataactaatggctcttcaataatattgaaatccatatcagtacgaacaccagcaaattgagccggtctgtctaaggccggatgttgaccaaaagtttcgtagtcgtggatgtagaaagtgggttgttcgctgctatttttcactgttgttcaatgtccaaggttgttaattattttttatcgctttagtttggttttgatctgctttaatacccaaaaaagtggtaacttattatttagcgttaattcaggtctgatagtggctggttatttacacaggcgtctatcagattacaaagtcatactaggcgtatctgtaattttttaccgacagctgctgcatatttcttcaatgtattatacgaaggcccttgtgtgccagaagctagccggctttcaagccgtgtgatggctgttgctttggttcccatgcgttcagctacttgcgcttgtgttagcccggcctttttgcgtgcagctagcagttcatcaagcaatgcaaattcttgttccagtttctcgtattcagcttttacagccggatttgacaacatttttgcaaccatttcatcgtgtgtcatggttggaggggtatatttaccagtcattttttacctctttcattctgacttcggctttcctgcgttctttaagtggggtcttttgtgttttcttcacgaagctgtgcagcatcactatacggtgcccaatcattgtgcaatagaatacgcgagcaattccttcagcccctttgagtctgagttcaaacaacccattaccaaacgcttctgtgtgtggttctccgaggttggcaccatgttctcgcattctttcggaatacctgatgtaacgggcttgaagtgtgtcagggagagcaaggatctcgttctccacctcggtgctatagtaatagatagtatatttcatgaaccaaatataacaaaattgttatatttttgcaatactttgctaatgtgaagcaggtatatgtgactattccttgttctattgaattgcaccccaaaagttgggtgcccgattactgacttaaggcggtggttctatgaagaaaaatatcctgttgcctctagaattcaggttgctgagtatttcctgtcaggtactcttggcgctaaactgactgtaaaacattttggcattgatcatagtactattgtgtacatattttcttactttcatgttccatgagcggaagttagttattagttagcatttttgatgcctggaataaaagattgtatgttttaagaccattttcccttgaccatattgatatgtttgcatagatatgcagcgaaaggttgaaaatattaatatagtgaatatataaaatttaatttacttaaagattaatagccaaaattaagggttaatttctgttggttgtggtgtcggagatgcaattggcatcaagtcactaaatgggcaagaagatcaggttttcatttatagtatacaacatcgaggtttatttgatgagttcactgaaggattagataaatgatgatgaaaatcgtgatgcacataattcaagggataattggtgcggtgagtgtattttcagttatgggtttagtttattttacactgatgtcaacattggaaaatcgatatcagtatgcaatagttgcaggtatatgtttggtactttctgcgtttttttactatataacgtaaaaaataaaagaaaaatgcatattattccaataggttatgattagtaagcgtagggattattctttacctagatttacccaggaggattcgactaataagagtattttaggatgggctttcctattattaatggtattgtcaaaggtaatctataaatatattttactagtttgctgatgaattgtttagagagttttatcagcaaacaggatatataataattagaatatatttttatgcatatatttgtctttattaagggtaattaacctcttgaaaatgatcattaatagattcaatatattgatcatttaaaccagtttcatattgaattctttcaagtaaatttattctattgacactataaaatggtttaataaaaaccccatttttggggtgggttattcttataattggaattcttgttctacgtgcatgaccaaaaaaaatttcgtaaccatccaaatcaaaaggaatttttttcatcacctaacctaattatcgttatatttttcgtcaattttaattatgtttcagcaataaggaaatttttatcttattattaagatgggtatcacaaatatagtcattttgaacatatatttaaataataaactaataaactaataaactaataaactaataaactaataaactaataaactaataaactaataaactaataaactaataaactaataaactaataaactaataaactaataaactaataaactaataaactaataaactaataaactaataaactaataaactaataaactaataaactaataaactaataaactaataaactaataaactaataaactaataaactaataaactaataaactaataaactaataaactaataaactaataaactaataaactaataaactaataaactaataaactaaatgttttctctatttgatgtgaattttctttaaaaaaatcttctgaaaatcctattttacaaagagttgaaaagtaaaataatgaagacagtttaagatatatagaatgttggtggaatattaatattttattcaagattttatcatgttctatataattaattgtctttatttggtttgtctattagtgtctgatttaatttccaaatagaattagctttataatttttatttattttgcatgaaataatagttgaattattatcatatgcaaatatataaattttttctctgacagatatataattacgtttgttagataatcatggagatcatagtgattaatgatagtacatttgaaatctgaaaaaattgtagagtaagagatggaagatgaacgatagggaagggaaaatggtgcttctgccagtggaaggttggtgatttattattcattcgcattggccgattgttttcgattgagtcaatattatgaacctttagtaaaaagttaatagattcatacccaatggatttcaaaatgcatcgcgacggcaagggagtgaatccccgggagcatagataacgatgtgaccggggtgagcgagtgcagccaacaaagaggcaacttgaaagataacggatatatgtaattaatgagaatcaataaataacggaaactgacttgtctattaatggttttagtcttattgtgtagtcagattggataatttgtatgtttaaattgaagataaggtatgaaaatggataacgtaaataagccgtcattccacaatgtgctggagtttgtacgtatgtttcgtcgtaagaataagttgcagcgtgaaatcgcagataatgagaagaaaatacgcgataaccagaagcgtgttttattgcttgataacttgagcgaatacatcaaacctggtatgtcaattgaggatattcagagcatcattatgaatatgagaagtgattatgaagaccgtatagatgatcatataattaaaaatgcggatctttctaaagagcgtcgtgaattgtctaaaaagcttaaaacaatgggtgaactcaaatagcattattagataaccacgcacgaatgcgtggttattcttaccgactacgcaacagcccaatcaggtttaagctctggatcaactaaggtataaatctgctgatatgaagattcttcttctgccatagttgccagttgatgtgctacatcttggcgactagctgcaccatgaatttcatgctgatatctttgacaatggcctgttccgggtttatctgttaatcctcctggacgaataattgtgtaattcaaggagcttgtctgaaggtagttttctgccattgatttacgcctgacagattgaccaaacaatgatttaactctgggtgacagggttttccagctttcgccacaacctattgaggtaacgagtaacatacgtgttatttcagttttctcaatagtatcaatgatagtcatattgccaaagagatctgaatcaattccaccaatagtagaaaagacgattgcttctgaacttacatgttgtactgttttttcaacatcttcagcattacaggcatcaccttgtatcactttgacacccaaagcactcagttcagtagcctgctgaaaattgcggataagcgcaatgacgggacgtttttgttgcagtgcgacagtcacgagatgacgtccaatgccactacccgcaccaaaaataagccacggtttcataggttattctcctggttaaataagaaatcgaatgataattaattgaacagggtcacggtaatgactgctcaaactaacccttatgtggggagaataaaattaacggtgagtatttttgtggggttagtagcaaaaaaaatggctccctaaaaagagccattctgctaatattaaataatgttgtttattcaaagaattgcggtttagccattggtgaagtagccgcattagtggctgaatggccccccgctccgcctttcccttcaaaatgagaaaaaggtcgttgccattcgttgataacaataggtttttcaatcatctcaggggctggtgctttggtcattggcgcataagaatgatgaactttggctataatagcaacaggttgtttaaccatttcatctttactctcttcaataatcatcactgctgcaatttctttagaaataacaatgtcttcagaaacaacaacgtcttcagaaacaacaatgtcttcgtctgcttcagattgctgctcaaattcaggaataatcggtgttgttgcaaccagttcaataactgaccgctcttcctgcactggtttagtttgctgtagaacaatgtcattttgttctgtaattcctgttgcagatttgattccgttctggtgagctgctggcgtctctgctaccttcggagattcaataacggtttgttcagattctgcaacaacgatgattgcaggtactgtttctgctgctattaccggcaatacctcattttgttgttcttgctgttcgatcatggaaatttcctcaggcatttctatggaaatcggaaccaccggatagcgaacccaaactttaccggaagccatttctggtgatgcaacagccatagataatggtgccggtgattgaagtagatttctctcatcgcggtaacggcggcggcgctgaccactaacgcgcaaatggcgaggtgagcgacgagagcggcgtggcataacattatcttgttgctctttattttcagtcaattgttgcggctgagctgtttctagcggtatttcaacaggtactggtaattgctcttcggtaacaacaggtatgggcagcgaggcgacagttgtaacttctttcacttcatctatgatgcgaattttttgttcaagctgacgacgttggcgacgtggtataaccggtagacgttcttctacctcattttcaacaatttctggtttctgggtttcaggttgcagttggcgtttttcttcctgacgacggcgttgacgttctgcacgttgctcgcgacgttgctgctgttgggtttcacgagcagcagtgtctatcgtcacgttgttatcttgagtgccatttttctgttgagtatttcgatttttccgctgttcgtcacgatcacggttattacgttgttcatcacgcagattattatcatcacgatctttacgtgaattttggcggcgttgattgcgtcgttcagaagagcgacggttatcatgaccggataatttgttctcttttttctgtgccggtttttcttcttctgcttctgtactgaacatttttttcaaagcagtcaagaagcggcttaagagacccggttgttccgttatagtctgagcagtgtggtttggctttttctcttttgctttatgtgatggttgctgtgctggcgtatcggctggcaaagcaaaagcagaaatagcgggctgctcaggacgcttacgttcaggttgaacatcttcttgaggatttatcgcgccagcttcatgaaattgaggaagcagatagctcagtgcagaaatttcctcacctttacgcacacgtagaacagagaagtgaggagtctgcatttgatcgttaggcacgatcactacgccaacatctccctgacggcgctcaattgcactgactgcctggcgcttttcgttcagtagatatgaggcgatttgtactggaacaatagcatggacttgatgcgtgttctctttcagtgcctcttcttcaatcagacgcaaaatggatagcgacagggattcattgtcacgaatagtccctgtgccgctacagcgtgggcaaacgtggtggctggattcaccgagtgatggactcaggcgctgacgggacatttccagtagaccaaagcgggaaatacggccaatttgaatacgagcacgatcctgacgaacagcatcacgtagtcggttttccacttcacgttgatgacgtactggtgtcatatcgataaaatcgataacaatcaaaccaccaaggtcacgcaggcgtaattgacgggcaatttcatctgcggcttcaaggttggtattaaaagccgtctcttcgatatctcctccgcgtgttgctcgggaagagttaatatcgatcgcagttaatgcttctgtggtatcgataaccacagcaccgcctgatggcaggcgaacttcacgctgaaatgcagattcaatctgtgattcaatctgatagtggctgaacagaggaacctcaccactatacagcttaattttactggtgaaatctgggcggccaagtgcggtgatatgttgccgtgccagatcgagaaccttgggattgtcgattaagatttcaccgatgtctgggcgcaaatagtcgcggaaagcccggacgataacattgctttcttgatggattaagaagggagccgagcggttttcggcggcttttttgatcgcttcccagtgtttaaggcggaatgataaatcccactgtagtgcttctgcggacttaccaacgcccgcagtgcggacgatcagtcccattccttctggcacttctaacgatgccaacgcttctttcagttctgtgcggtcatctccttcgatacggcgggaaataccgcctgcgcgagggttattgggcatgagtaccagataactgcccgccagactgataaaagtggttaaggcggcccctttattaccacgttcttctttatcgacttgaacgataacttcctggccctcccttaaaacatctttgatattagggcgaccgtgaggatggtagttattgggaaaatattcgcgggctatttctttaataggaaggaaaccatgccgttcagcgccgtagtcaacaaaagcagcttccagactaggttcaattcgggtgattttacctttgtagatatttgcttttttctgctcgtgtcctgggctttcgatatccaaatcataaaggcgttgcccgtcaaccagagcaacacgcaactcttcttgctgagttgcgttgattagcattcttttcattgtaacttactcattattttttacattagttatagagctacgggcaaatatagatgagcgactggtaaccgatggtctcgtgtcttttacaaatccgccaacctcccggttgtcgtttgtatagagacgcatattttcggcaggtctgaattttcacttagaaaacagtacccttttctaggaataatctgcaaatataaatgaagctgatttgatccgattccagtaatctgctacccgtagcccgctaattatttgatttcccagtacgtcttacgccattgctgcgtttttgtgcaatcaaatgaagaacaaacgtttaacttcgccattcaggattaaaaaactgatggtggctacgtattattccattgctgttggggtgatagcaaggtgactttatgtctttaagcggtttttctgatgaaataggaagaaatagttaatatttaatctttatcttaaagtagcgaaggtaacaaccggaaagtatgcgtgatttttacacatatttaaaaatgagtagcactctgcttgagtgataattaaaattgctatcatgaaaacgaataatcaagttgtacaatttgtcactattgatgacgatgaagctggacagcgagttgataattttttattagcgcgtttgaagggtgttcctaagagcatgatttaccggattgtgcgtaagggggaagtgcggataaataaaggcaggataaaacctgagtataaattgtctgcgggggatgttgtcagaattccaccggttcgggttgcagaacggcaagcagtgccagtttcagctaaactggataaagtcgctgcattagacgattgtatcttatacgaagatgaccatattctagtgctcaataaacctgctggtacggccgttcatggcggtagcggtttaagttttggtgttattgagggattgcgggttttgcgtccggaagcaaaattcctcgaattagtgcatcgtttagatcgtgatacctctggaattttgttaattgctaaaaagcgctcagctttacgggccttgcacgagcaattacgccttaaacagatgcagaaagattatctggctttagtacgaggacaatggccatcacattgtaaggttgttcaggctccattgctgaaaaatatcctgcaaagtggtgagcggattgttaaagtaaacagtgaaggtaagccttctgaaacgcgttttaaagtagaagagcgttttgccaatgcaacgttagtgaaagccagtccggtaacgggtcggactcatcaaatccgtgttcatactcaatatgctgggcatccgatcgcttttgataatcgctatggggataaagtttttgattcgcaactgtcagctacgggtcttaaccgcctattcttgcatgccagtgtgataaaatttactcatccctcgacgggggagacattacgtcttgaagcaccgatggatgagcaattgcgctattgtataaacacgttacgtcagaatcacagtaattaacctatcgccgtcagtgggtttaccccctggcggattaataattcagtcaatgtaattaatggtaaaccgatgagcgtattcggatctttcccttcaagtcgttcaaataaagtgattcctaacccttcgcttttaaagcttccggcacaattaagcgggttttccgcggttaaataagcccggatttcatcatcagccagctctctaaaatagacattgaataattcacaacgggtatcggttattcctgttttgctgttaaagagagaaatgccggtataaaaggtgacgcaatgaccactggcttgccgcaattgtttaaatgcatgttcgaaactgtggggcttgccagtgatttcgccattaataacacaaacttgatcggaaccaataatcaaatgctgagaatattttgtttgtaatgcctgtgccttggcttgcgccaaacgcataacgagctgttctgcattttcattcattcgaggtgtttcatcagtattaggagctgcacatataaagggtaaacgaagtttttccagtaacatgcggcggtaagctgatgtggaagctaaaatgatttgtgtcataatttttccaaaagacatggcgaaataattgcaggcattttaaactaggcacagcttaataagcgaatatttggcggaaaggtgcagatgtgtggcctttttctttgactatatctcattacaaagataatatgcgcgccttatgcaaaaagtaaaattacccctgaccattgatgcgcttcgcgcagctcagaaacgattagactacgcaggtagttattcacctgagcaagttttgcgtatcgcggaatctgtggttagcgtggacaatgatgtagacagcgttttatcgtttcagatagataaccaacgtctggcggttgtgcgtgggcattccgatgtggatgttacgcttgaatgtcagcgttgtggcggtaatttcagccatcacgttcacataacatattgttttagcccggtcgtcaatgatgaacaggttgaagcattaccggaagagtatgagccaattgacgttaacgaatttggcgaaatagatttgctggcaatgattgaagatgaaataattctttctctgccggtggttccggtacatgattctgaacactgtgaagtgtccgaagcggacatggtgtttggtgaattacctctagaggctgaaaaaccaaacccatttgccgtattagccagcttaaagaaaagtacttaaggagtaaggtcaatggccgtacaacagaataaaccaactcgttctaaacgtggtatgcgtcgttctcatgatgcactgactgcaccattactatctgtagataaaacttctggtgaaactcacctgcgtcaccatgtgactgctgatggctactaccgtggccgcaaagtcatcaacaaataatctcgccagtcattagcaagttgataccttgactaatctgactttagcgttagatgctatgagcggggactttggtcctcgcgttacggtgcctgctgcattgcaggcactggcgtctaaccctagacttaaattattgctggtcggaatccccgatatcatttctccgatgcttgtaaatagtgatactgagttgctcagtcgtttacaattggttcctgctgaacgggttgtggctaatgatgcgaaaccgtcgcaagcgattcgtaacagccgaggaacatcaatgcgcattgctctggatttagtgaaatcaggtgaagcgcaggcgtgtatcagtgcaggaaataccggagtattgatggggttatctaaattgatgctaaaatcgatagaaggcattgaaagacctgctttgatgaccgtgttgccaaacctgaaacagcggcaaactgtcgtattggatttaggtgccaatgttaattgcgatagccgcatgttggtacaattcgccattatgggttcagtgatggccgaggaagtcgtgggggtggttaatcccgcggtggcgttgcttaacattggtacggaagagagtaaagggctggataatatccgcgaagccgccactattttaaagcgtattccgacgataaattacattggttatctggaaggtgatgaattactgacaggtaagagtgatgtattggtatgtgacggcttcgcaggtaacgtgacgttaaaaacgatggaaggggcgatcagagttatcttatccctgcttaaatcatcggatggacaaaagaaaaaattttcctggttgttgagaatagtcaagaagtggttgcaaaaacggatgacaaaacgcttcggtcacctgaaccctgaccagtataatggcgcatgtctgttaggattatatggaattgtaatcaaaagccatggggcggctaatgagcatgcgtttaaagccgcaatcgaacaggctgttcaggccgttgaaaggcaggttcctgatagaattgctgcacgcctggaaacagcattacccaagagtgactgaacatacatgtatacaaaaattttaggtacaggtagttatctgcctgcgcaagtgcgtactaatgctgatttagaaaaaatggtggatacttctgatgagtggattgttacccgtacaggtgtccgcgaacgtcgtcttgctactgatgatgaaactgttgcggttatggggttccgggctgcaaagaaagcaattgaaatgtcgggcattgataaagagcagattgatttaatcattgttgcaacagcttcatccacccatgctttccccagttctgcgtgccaaattcagcacatgttgggtacccaaaattcagcggcttttgatatttctgctgcttgttctggttttgtttatgcactgagtattgctgataagtttattaaaaccggtgtggcaaaacatgcattggttattggttctgattctattaccagaacacttgatccagaagatcgcggaacacttgtcctgtttggcgatggtgcaggtgctatggtggtaggggcttctgatgagccaggaattctttcaactcaccttcatgcaaacggtagctatggtgaattgctggtattgccttatcaggagcgtcagaatctaaaagagcccgcatatgctagtatgatcggtaatgaagtatttaagattgcagtccgtgaattggctaacatagttgatgagactttagaagcaaataacttaccatatagtgagttggattggctggtacctcatcaggctaatttgcgtattatcgcagcgacagctaaaaaattaaacatgacaatggataaagtagtggtaacgctagatcgttacggtaatacttctgcggcatcggtacccacagcatttgatgaagcagtacgtgatggccggattaagcgtggtcagttaatcttaattgaggcttttggtggtggccttacttggggttcggcactgatacgtttttaatttgacaggaagatgaacatgtctatgtctgaatttgcaatggtatttcctggtcagggttctcaagaccttggtatgttggccgatttggctacagcgttcccagttgtcgagcaaacttttgctgaagcgtctgatgtactgggatatgatctctgggctctggttcaacaggggccagaagaagaactgaataaaacatggcaaactcaacccgcgttgttggccgcatcggttgctatttggcgggtttggcaggaaaaaggtggaaaagcaccatcactgatggctggacatagccttggtgaatattctgcactggtttgtgcgggtgtcattgatttcaaacaagctattagacttgttgaactgcgtggcaaattgatgcaagaagctgtacctgaaggcactggtgcaatgtatgttattattggtttagataatgaatccattgatcgtgcttgtaaagaagtagctcaggggcaaattgtttctcctgttaactttaactcacctggtcaggttgttattgccggtgagaaagaggcggtagagcgtgctggagatgcatgtaaagccgcaggggcgaaacgtgcgctgcctttggcagtcagtgtaccgtcgcattgtgcactgatgaaacccgccgcagataagctggcagttgttttggaaggaattgaatttggctatcctcagttcccggtggtaaataatgttgatgtgaaaatagaacaatctgctgaagctatccgtcatgcactggtacgacaactctataaccctgttcgttggacagaaacagttgaatttattactgaacagggtgttggtcagctattagaaatagggccaggtagagttttgacaggtttaactaaacgaattgtcaataccttaagcgcagcagcagttaatgacacagcttcactaataactgcattggaaaataattgagggcaatatgagattagatggaaagattgcattagtaacaggcgctagccgtgggatcggccgtgcaactgctgagctattagcagagcgtggagcctatatcattggtacagcaacaagcgataaaggcgctgaagtcattagtgcttacctcggtgaaaaaggtaaaggttttgtactgaatgtcactgatccggaatcgattgaacagcttatgtctaccatccgaacagagcatggcgggcttgacattttagtgaacaatgcgggtatcaccggtgataatctggtgatgcgcataaaggatgatgagtggcagcatgttattgacactaatctttcatctgttttccgtatgacaaaagcggcaatgcgcttcatgataaaaaaacgttatggtcgtatcatctctattggttctgttgttggatcgatggggaacgctgggcaggcaagctatgcagcggcgaaagcagggcttgttggtttcagtaagacattggctcgcgaagtgatttcccgtggtattactgttaacgttgtcgcgccagggcttattgaaactgatatgctaagagcgttgccagaggagcagttggcgaacttttcgaatgatatccccgctaaacggcttggggatgtaaaagaaattgctagtgctgtggctttcttcgcttctgatgaagcggcttacatcacaggcgaaacattacatgtcaatggcggcatgtatatgaactaaaaaatgagcgaaccagttgcattttttgtgtcaaataacgcaaaatagagcaagtttgtggttcgaccagccgggattgggttgcatcttttcctgtattttataaactacgaaaaccatcgcgaaagcgaattttgataggaaatttaatagcatgagcactattgaagaacgcgttaaaaaaatcatcgttgaacaacttggtgttaaagaggaagaagttgttaattcagcttcttttgtagatgacttgggcgctgattctcttgacacagttgagctggtaatggctctggaagaagagttcgatatcgaaattccagatgaagaagcagaaaagatcactacagttcaggcagctattgattacgtccagaaccaaagcgaataagtgaacacacctaggcggtcattcgaccgcctatgtttctgccctaaataatttccctccttggaggataagcgtgtctaagcgtcgagtagttgtgaccggactaggcatgttatctcctgtcggtaatacagctgaatcttcttggaaagctgtttgtgccggacagagtggtatcagccttattgaccattttgacaccagtcaccatgcaactaagtttgctggtctggttaaaggttttaatcatgaagatttcaatatttcgcgcaaggatgcacgaaaaatggatgatttcattcaatatggtattgcagcaggtgtgcaagccattgaagattctggaattgaagtaacagaagccaatgctagtcgttttggtgctgctattggttctggtattggtggtttgggtctgattgaagaaaatcacggggcgttggtggcgagtggtcctcgtaagatcagcccgttcttcgtaccttctacgatcgtaaacatggtagcaggtcatctgagtattatttacggtttgcgtggcccaagtatttctatcgccacagcatgtacgtcaggtgtacataatattggtcatgctgcccgtattattgcttataatgatgctgacattatgctggccggtggtgcagaaaaagccagtactcctctgggggttggtggttttggtgctgcccgagctttatctacccgtaacggtaatccacaaggtgcaagtcgtccgtgggataaagaccgcgatggctttgttctgggggatggcgcaggtatcctggtactggaagagtatgagcatgcgaagagacgtggtgcgaaaatttacgcagaaatcgttggctttggcatgagcagcgatgcttatcatatgacgtcaccaccagaaaatggtgcaggtgctgcgttggcgatggaaaatgcgctgagagatgccggtatcactaccaagcaagtgggatatattaatgctcacggtacttcaacatctgctggcgacttagcagaagcgcatgcagttgagtccgtgtttggtgaaggcactgatgttttagtgagctccactaaatcaatgacgggtcatttgttgggcgctgcgggggccgttgaatctattttcactatcctggcattgcgtgatcaagttgttccgccgactatcaacctggaaaatcaggatgagaactgccgtctggatttcgtgccaaatgagtcccgtaaggtagaggggatggaatatgcattgtgtaactctttcggcttcggtggtactaacggctcactgattttccgtaagattaaacctgattaacaggtagagcctgatattacagaaaaatacggttgagttccgcttagtatacccaatggatttcaagatggatcgcgacggcaagggagcgaatccccgggagcatagataacgatgtgaccggggtgagagagtgcagccaacaaagaggcaacttgaaagataacgggtatatgattttgtaaatactttaaggcgatagtatagagagctccaatagttaataattattggagctttttttgtggcaagaatcatggacatttttgcactcgtatcagcgatatactatgataccgcttgttgataaattgcattgaaatgccttttttgagtaattaagaacaaaattatatgtattggattaatggggagcggtgcgactatttacctgccaatgatcgttcagttcaatttggtgatggttgcttcacaacagcaaaaatagaacaggggcaggttgctttgttgtcgctgcatatccaaagattacaaaaaggcgttgaaaggttatatcttccacaacccgattggcaacggcttgaaagccatataagacagattgcttccacgactgaacaaggtgtacttaaagttattatttcccgtggaaccggaggacgtggctatagtgctcaggggtttacgcaacctaatcagatcttgtctctgagtccttatcccgacaaatatttgaaacagcgtcagaaaggtttatctatggtgctcagtccggtagcgatgggaataaacccctatcttgctggaattaaacaccttaaccgattagaacagatattgattaaaacatttatcgaaaaatcgaatgctgatgaagctctggtacttgatactgatggcttgctggttgaatgctgtactgcaaacattttctggcgtaaaggaaaaggtgtgtatactcctgatttacgaggttgtggtgtcgaaggtgtgatgcgggaaagaataatcgcgttattatcggaaagcgattatcacttttcttgtgtaagctgttatcccgaaacattggctgatgcagatgaagtgatagtttgtaattctttaatgccggtgatagctgtcaaagaaattcaagctcatgaaaatcagcccagatggcaatatcagtcaagggaactgtatgaatatttgcttcctgaatgtttgaagttgtaattcacgatgcatttaagtgaaccgtgtgtttcagtgaactgtgtttaagtgattagattaattgatgaaatggaaaaaacgcctttttgccctattggctttgattgtcattacggcagcaatattactctatgctggctatgaaaaagttgaaaaatttgcggatcaaacattaacaattaaacagaatcgaatatttaccctgccaacaggtattggtcgtcatggtttggaagcgttactggttcgggataacctgattgaagatagtcatattttcccttggttattaagattggagccaaaacttgccgagttcaaagcgggaacttaccaattaacacgagaaatgactttacgggaaatgttgcaattattctctagtggtaaagaagcgcaatttacggtccgttttgttgaaggtagccgtttatctgattggtggagaatactacagcaatctgaatatcttaaacatgaattggataataaagatgctcaggaattggctgaaatactcgatattaaagatacagatactctggaagggtggctttatcctgatacctatcactatacggcaggcacaagcgatgtagcattgctgaaacgagcatatcgacagatgaaaatgacgctggaagaggaatgggaaggtcgcgacaaaaatctgccctataagaatgcttatgaaatgttgattatggcgtcgattattgaaaaagaaactggtgttgaggctgagcggacaaaagttgcttctgtatttattaatcgtttacggttgaatatgcgacttcaaactgatccgacagtgatttatggtttaggtgaaaaatatacaggcactatttttcgtaaagatttaacaacattgacgccctacaatacttatatgattaatggtctgccacctacaccgattgcaatgcctggccttgcttctataaaagcggctgcacacccggcaaaaaccgaatttctctattttgtggcgaatggcaaaggtggtcatacttttacgaccaatctggctgcgcataacaaggcggtaaatatttaccgtcagaggttaaaataggacaaatgaacagcaaatttattgttattgaagggctggaaggtgcaggaaaaacgtcagcaatgaaaacaattgttgaaatgttgcagcagcacggtattcagaatttaatttttacccgtgaaccgggtggaacacctctggcagaaaaattacgtgggttaattaaacaaggtgttgaaggtgaacctctgacggataaagcagaggtgttaatgttatatgcagccagagttcaattagtcgaaaatgtgattaaacctgctttggcccgcggtacatgggttgtgggtgatcgtcatgacctctcttcccaggcatatcaaggagggggacgtggtattgataaaaacttgatgacttcactacgtgatactgtgctgggtgattttcgtcctgacctgactatttatctcgatcttcctcctcaaattggtttactgcgtgcccgtgaacgtggagagttagaccgaattgaaaaagaatcgatggatttttttgatcgtacgcgcagccgttacctggagtttgcagcacaagataagagtattgtgaccgttgatgcagctcaaccaatagagcaagtacaagcagatatttatcaggtacttgagcaatggctaaagcagcaggaaaatggctaatgaattggtatccttggcttaatcaggcatatcgtcagttggtggaatctcatcagcaagggcgaggccatcatgctttattggttcatgctaatgcaggtactggggccgatgtgttgatctatggattaagccgatggttaatgtgtcggaatagacaggggatgaaaagttgtgggaagtgtcatagttgtcacctgatgatggcaggaactcatcctgattggcatattatgtcgccggagaagggcaaaaccagtgttggtgtggaagcggtacggcaaattacggaaaagctctatagccgttctcagcaaggtggggtaaaaattgtttggttacctttgaccgaatgtctgaccgatgctgctgccaatgcattattaaaaacgttggaagagccaccgaaacatacctattttcttttggaatgtcggcagccgtccagtcttttggctactttacgcagccgctgtttttactattttctgccggtacctaagacggaaagtagcctttactggttgcaaaaacagttgcctttaatttcttcggtcgatgcaatgaccgcgttgaaactgtctcagggagcgcctgtagcagcagaacaattgttgcaaccggagcaatggcagatacgggagcagttttgccaggctgttaaacaggctttggataaacatgatgctttgtcacttttaccccaactgaatcatgaaaatgcgccacaacgccttcattggcttatcagtttgttatttgatgcggtgaagtggcaacagcagttacagcgttattgtatcaatcaggatcaacaaacgctgatttatcaattgagttccatgcataccctggctgttttacttcaaggcgttgatgactggatgtcttgtcgtcatcagttgctttcagtcgtgggcgtaaattgggaattgttactggtagaacagttgctcaattgggaaaaacagtttacttcatcaccctgaaatctttttgtatacgagtttaaatatgttgttagttgattcgcattgtcatctcgattgtctcgattatgaaaacctacataaaaatgtagatgatgttgttgcaaaagcggcagatcgggaggttaaatttatgctggcagtagcaacgacgctacctggtttccagcaaatgaaaaccttaattggtgaacgggaaaatatcgtattttcctgtggtattcatccacttaacttggatgaaggttataattttgatgagttggcgcgtttagcttccgggaatgaagttgttgcactaggtgaaactgggctggattactattatcaacaggataatgctgaattacagcgaacctcatttcgtgaacatatccgtatcgggtgcaaactcaacaagcctgttatcgttcatacccgtagtgctcgtgatgatactttgagggtattacgagaagaacaggcacgagaatgtggtggtgttttgcactgttttaccgaagataaagataccgctagagaattactggatttaggcttctatatttcattctctggtattgttactttccgtaatgcggagcagattcgtgaagcggcaagatatgtaccgttggatcgtattctgattgaaaccgattctccttatcttgcacctgtgcctcatcgtggtaaagaaaaccagcctgcctatgtgcgtgatgttgcggaatatatggctgtacttaagggagtgagtattgaggcattggcagaagtgaccacacagaatttttgcgatttatttcatgttgatgtagacaaaatttgatttatcaacttgaatctttggtttgtaagcgctcatatatctgttgttttttgaataaaaggaaaatgtgatgatagaagaaactattttcagtaaaattattcgccgtgaaataccttctgatattgtttaccaggacgatctagtcactgcattccgcgatatttctccacaggccccgactcatattttgattattcctaatgttctgatcccaaccatgaacgatgttaaaccggagcatgaagcagcattaggtcggatgatgacggttgcagcaaaaattgctgaacaagaaggcattgctgaagatggatatcgtttgattatgaactgtaatcgccatgcggggcaggaggtttatcatattcatatgcatttggttggtggtcgctatttagggccattgttgatgaagtcaatatgaagtactgaaattcatggacatcggcagatattcggggggatgtttattctaaactggctccgaatatctcgattttgtaatataccctatggatttcaagatacatcgcgacggcaagggagcgaatccctgggagcatagataacgatgtgaccggggtgagggagtgcagccaacaaagaggcaacttgaaagataacgggtataaatgctgcaaatttatcattggagttgaaccgataatatgttgctggtgtcacagcaaaaacttatctgttttttaaaactctgtaattggaataggttgatgagaagaattctttttgtagcactatcggttatgtttttggcgggatgtccatccttgccaccggagcagcctgaacctccgactccggttgtaccagtgaccccatcggaaaaaccgacaccaccatctgaaaaggtaccagagcctcctaaaatgagtgcgattgactgggaaagtaccgtgcaaccattagtagagcaactcgttaaggctcatgggttggaaaacgcgaagttactattagttgatacagtgaaaaacaatactaacggcgcattacaaaccatgcaagcaaccgatgctttgcgtcaagctatcagtagcgagcatgtttttgaattaataccccaaaatcaggtgcaaaatgcccgtcaatctctgggcttatctgaagaagatagtttgggattgcgcagtaaagcgattggtctggctcgttatttgaatgcggaatatgttctctattccatagtttcaggtaatagcgataagcgtgatatcgtcatgcaattgatgctggtaaagacgggcgagattctttggtcggggcacggtgacgttaaataatcataattgtttattgcgggcattgtgcaaacaatggccgcataccgcagtaaatgattggaagataagaccgttaagtgggctgacgaatgagagttattatgccaccaatggtgaatatcatattgttggccgcaggcaggggcagcaggggaaacagcttggcgttaatcgtcagcgtgaaaatgccattctgcgccatctcagccaggtaaaaattgctccgcaagtcatagcaatggttcctcactggctgttgttggaatggctgcccggccatattattgggcaaaatgagttttctcagcctgatttgttgcaaaaactggcggcattattggctattttgcatcaccagcctctgtttggttaccggcttcaattgaggcatcagctagaaagccattggttgcaaattgataaagcgcgtcttactccctgttggttgcggctgcataaacgttttatgtcgtctccgatgccttcaatactaaaattatcacccgctcatatggatgtgcattacggtaatttgcttaatacctctcaagggctgaaacttattgattgggaatatgcaactgatactgatattggatttgcgttagcggcactgtttcgcactaatcattgggatgagccgcagcagcaggattttttgaattactattgtagccagtcatcaggatattcaaaccggacactattagaacgccaaattaaacgttggctaccttgggttgattacatgattttaatgtggtttgaagtgcgttggaaacagagtggtgatccacaatttttagaattagcgcaaccgttacgtctctcttttggtctaacgttttaagctgcattgattgcagtaatatgaatatatacccaatggatttcaaaatggatcgcgacggcaagggagcgcagccaacaaagaggcaacttgaaagataacgggtataagcgaggaatgttatgggtccggttatgttagatgttgttggttatgaattggataatgaagaaaaggaaattttgcaacatccattagtgggcggattaattctgtttacccgcaatttctatgatgttgagcaattaagagaattagtccgtcagattcgtaaggcttctcgtcatcgtcttgtgattgctgttgatcaagaagggggcagagttcagcgtttccgcgaaggtttcacttgcttaccggcggcccaatcttttgctggattgagtgacaatctcaatggtactcaattggcggaagaggcgggctggttgatggcgtctgaaatgattgctatggatatcgatatcagctttgcgccggttttggatttaggtcaccagtgtgcggctattggtgagcgttcattccatgaagaccctgaacaagccaagatgatggcagagcattttatcaaaggcatgcattctgccggaatgaaatcgacaggtaaacattttccggggcatggtgctgttaatgctgattctcataaagaaactccctgtgacgatcgcccgttggaagttatttgtcatcatgatatgtctattttccgtgattttatccagcgtaatttattggatgcgattatgccggctcatgtgatctatcctcaggtagataagcatcccgccagcggatcgtcatactggttaaaatcagtgttgcgtcagcaattgggctttaatggcgtgatattttccgatgatctctctatggagggagccgcgatgatgggaagttacgttgaacgcgggcagactgcactcaatgcaggttgtgacatgattttgatatgtaataaccgtgatggcgcggttagcgcgcttgataatctgccgttgaccaaagtggaaaaattatcagaattgtaccatcgaggtggtcaatacagtctgaatgagttaaagaattcagaacgttggcagcaggctaataaagcactaacggctttgtatgaacaatggcaggattgcgcacggtaatttgtaaagtgtttgtgttactgccaaatagatgacctttagcgttaattgtgcgggaaaatatcccgcttttttgtatacatagcatggtcacattcctgaaatttctttgatatcaggctctttaatgcctcttttttgaggcatattttattttctatgtaaataagaaaatgaaataaatcagagctgaatccaaccaactgaaaataaattgacaaattttgtgattgatgtttatttattcaaaagaatttgatgttgttcaattttggtatgacccactaaccagtcatgatattctgtaattatcacatcggttatttgtataaaactaaatgttatttaaaggtattattttactgcccttaaataacatttggtttacattttagtggggtagtcatgacaacaccaaagaagagaattgttatcattggtggaggtgccggtggtttggaactggcaaccagtctggggcataagttaggtcgtaaaaagaaagcagaaattgtgctggtggatcgtaaccaaagtcatttatggaagccgttattacatgaagtggcaacaggctcccttgacgatggagttgatgcgttgagttatctggctcatgcccgtaaccactatttcagtttccaattaggggcattgactgatattcaccgtgatagcaaaaaaattactttgaatgagatcagggatgaatataacgaagtattggttcctgaacgtgaattgagctatgacattctcgttatggccttgggaagtacatctaatgattttaatacacaaggtgtgaaagagcactgtatcttcctggataacccacaacaggctcaccgtttccataatgaaatgttgaatctatttcttaaatattctgcaaactgtggtcagcaagataaggttaatattgctatcgttggcggtggagcgacaggtgttgagttatcagcggaattgcacaatgcggtaaaacagcttaacagttatggttttgaagggctgaattcagaagcgttgaacgtgacgttagtcgaagcaggggagcgaattttgcctgcattgccggcacgtatttctgctgcggcacatcaggaactcacaaaacttggcgttcatgtattaaccaaaactatggtgaccagcgctgatgaacatgggttgaatactaaagaaggtgagctgattaaagctgatctcatggtatgggctgccggtattaaagcacctgattttatgaaagatattgccggtcttgaaactaaccggattaatcagctagtggtaaagccaactctgcaaacgacacttgatgatcatatttttgccattggtgattgtgcatcatgctcgaagaaggaggggggttttgttccaccaagggcacaggcggctcatcaaatggctagccgctgttacagtaatattattgccttgttgcatgataaaccgttaaaagagtatacctacaaagatcatggctcattggtatcattgtctaaatttagtacggtgggtagtttgatgggcaatttgatgcgtggttcaatgatgatcgaagggcgtatagcccgtgcggtttatatctctttatatcgtatgcatcaggtggctttacatggttatattaaaactggcttgatgatgcttgttggcggaattaaccgtgttatccgtccgcgattgaaactacattaatgatttaattgatataaggccacccgtagaataacaggtggccctgataaagcatcactactttaatctgaaatcatttaccttaattaagaaaacaggcgatcaactaatttgaaagcatttgcgacatttggtcgcgtgccgactccttgtagttcacctattgtaaaaccactacttctaaccagtgttgctatttgagtgcaattaagatatttatgatattttaattttatataggactgaataagcgctaatgcacctgagactaaaggtgtcgcactggatgttccattataactgcgcgtataatttctcttatttcctggtaggtactgtaagtttgtatatccagtcgttgtgacattctcaccccaggaatttaaactggtgtgaagattatgattggaaaaacctaacctgtgtccattaattgatgtacaggcaccaatcataataccgccaggatcgccataattagggaaagtgaagtcataggctaaattaataccactattaccagaagcgaaaataattattgcccctgcatcagcacaactttttattctttgccaattagatttgagataggtaaaaggataatatctattattggctacagtttgaatatttaaactaataatatctcccggtaaaaagctatatattattctatcaaagtcatcgacgtcataaaaacggaattgacattcgtgagcaatacctgtcacaccgaatgtattatcttttgcagcaatacagccggtggcggctgtgccgtgattacaatcttgtgtttctgggcggctgttgataaccgtaatattaccaactaaatcttcatggtttctataaacaccaaaatcaagatggtgtacagtgacacctttgcctttataaccttcatcccaggcttttctaatattcataccgctgtgttcgtctaaatatccttgtagatgtgaaaaatcaggtgtaacgatatgagtagtatcaaattcaggaattatcgtttcctcttcggatagaagcaaaggtggcggcggcagctctttcaaaatcggcataagagagcaaaattcgacataatccagtttctccagttcattggctaacttgactaaatcagcatgattaatatcagcatctatcttgtaaagatgaattaatttactgaattctggtgttttccaggttttcttatctaaatcttcttgattaaaaacaggttttatctctattgaatgttgagatgaattaaaagcaggtaataaattatctttttctatttcaaatttttttaatccatcaggggaaaacataatctcaaggttatatttcaaattcttatttgggatatcattgtttccttttaaagaaacagtatttcctttggaaggtatctgtttcgatggtatatggttaatgttgatattatcagttttgtctttatctatctcatcgatttttttatcgatatcaaacagaaagtctgattcttttatttctatatcttctggtgtaagcgtagcaattattttaccgtcttttttaatggttgcttctattttataatttgcgggtttaagtgaagtcaaacagacgagttgattatcttcactataacattcatatatctcttttgtttttgaattggttacggtgtattttatttctgtatcgttactaatttcaccgtgacatttaagatataaattaccgtcaaattttgcagattgaaaatactcaagggatatggacattgtcattctcctctttggttaattacctcttgagtataactataatttggtatctcatattattattatttctcagtccattgttctgttagagagttactggattatttatactgattattactgaatgtgatttataaattaatttataatcgctttggtgaggaagttatttttcttaaaataaaaagtgggtttttattaaggtgggtaagtttgaatgaccttagtaatagagtgggatatattcgcataatcaagcgcaacatcgttactctgtaagtaaacatattcgtattcctttaaataattcattgaatattttaccaccccaagtttttcaagggcgattacttaatcggtttacccaaaaatctatttcctgcgcagggacttcattaaaattggtttcctttggaaagcactgcttgattaacccattgatattttcattgatccctttttctcaaggtgagtaaagtctttaaagaaactttccaattacagagaatgacgccaacaaatcatgctatttatcccatataattatgaagaatttagattaagtgatcttttggtagatcgagtggcaggtaaaaagcaaggctggcatagataaatccgcactagagatctttgtctccttaggattcatgagctaaacagttcgataatcgtttagataacttctttgacattcatccagagtttgtatctaagatcgttattgtgaacgatagtcgttcatgtattgataaaattaaaaaacacctaatgtaacgtgaataaactagttttataactctatctcagtaaggtgatccctgagtagttgaaaagcatcagtattgttattctgttggttgaaaaggtgcttatctccttcaattaattgactgtagaactgcccaccatctgttacttttaatatttgccaaagatcagaccagcttgtctcattactgcgctctaaaggagagagagaaatagataaccctcttgtagtgcctgaaaaaaagactaccttattattttctgttctgagcgccaagtgattgatgaaataacactcacggttacctttttctgctaataggttaataattccctgaacgcctaatgaagataaaatgtatttagtatacagcgaggggaaaccattaagagcatttatatggaaggtgctgtcctcaataaaaacataggaagaagggacgtgtggaacctgatttaatttaaatagtaggttttcttgaggatcattagtttgtaactctttaaagtcgaagcttttatgaaccaagtttatgtcagcatgactggaaaaaatagattcggcataagtgtatttctttgagttagacgtgtaaaaataaaggttcataatcaagtcacaatttcatctattttatgtttggcatgaaaaccatttaatccaacagagagcgacaataagcgctcactcgcaggcagttaagtttctcagtttattccttttcagcatattatagtgcacttaaaaggtcaagccagtacgcgaattgttgccaattcgaatttataaaataacgtattagaataggcttaattatctgggaggtttcaggtttgagactcaccctgatggaatggaaggaaatggataaaatcggtaatcatattagataatatcagtttgtataaaaaacaagcttaatgtggggtattttccgttttccaagcgaacccagaatagaaccaaaagactcattgaaattttttgaaaactcaattccaagctccaaaaattatgataataaagaagttaggttctctaagggtgaaaaaggtaatattcatcggttcgaagaaactaatgggaagtatcactggaatagaagtaccagtgatgtaaagaatccgttgaataaaaatgacattcctaatgttttattttcttttcaggaaaataagacattgtttgaaaaggaactaattaattagtgtgggagccaacaccggtattcaatattttgctaatagcagtgttgatctcaatgatatcgtttttgtgcactgggctggcgtattaacggccaattctggtcagtaggcacaatactttggaatgtgacctgtagggctggctcaagctatgtaaaatgtgatggttcaaagaatggttgagtaaaatttttctttattaaaaacattatatggatattggttatatttttatgaatataactatttctttattatcagatggttgtgtcggatttttatagatgaaatgtttctttttttacttggagatgtaaataaggctattaaaaataggggtatttatcgggataataaattattgggaaggattcgactaataaatacaatttttcatagggatggatcgtttgactcccaatatatgataatgggagtcaaaataatcatctttctagtccttcggttatataataatactatgatcttaacgcctgattattaaatgctggattagattgaatatggattctctgtaaatgccgttctgatttggaagtaaatccttcacggccatgtagcagagagaaattatccacaatcaccagatcactttttttccatgcatgagcatataaatggcgcttatcatataatatattgataaaatcttgttgaaattctgctacttgatcggggttgatattatgatattcaatagcatgtttatttaggaatttttctccatctactgccggttcgttatatctgataacgaatccatttctgtccggatgttcttccactaaaggagagtgaacttccccgccataatgagtgactttattaatgcgataagtaatcgatatattcttccactgttctaattgctgttgagtagcattagcaacaacacggcgagtattgacaaaggttgtcctgcccccttgatcgctttcaggtgcgtgggcgcaatggaacataataaattcgggaattgttggtttgtacatgccatcccagtgcaacggcatatagctattatcaaaaacgtgatcggtagcatcttggtgttcacgaacatctaaaatagcaccaaacggccacatcattatttctccccaattacgggcatatttttcatatttttcgtgatcagataaatcagatttaaaaccacgtaatataagcagatggtgttttcttgccagttctttcagttgttccactggtaatgtatcaatatgttgatcggaatattgaggcgtaatttttaaaccaaaaggggttatttcttctgtctgaaagctatttaattctgtcatgctattttccttcaaattacatagtgactgggttttccatgaatatttactaattttccgcccatcatctgaacttctttgtgtttcataagtataaattgcccatttacattggctgcgacaccatgccaaggggttaaccaatcatcccgggttggcatcatatgaataccaaatttaatactgtctgctggttgaggatgaatagacagacgtatggcttttgggaaatgagtatctaataaacttccccatgcccaacttcgttgaataacaccgatagctctttgtttggcatctttctgtagggcattgtttgatccggtgtaaccaggtaataagctgtcttcatataaaaagcgggtgactgcacggtataattgtaatccgttattattttgcaacagttcgtctttgatagatgcctctgagcgggcataatgttttactaacatctgtctctgtaaattaaaatcatcactatgttcgcagagttccttatcgtcattgaggttaaatgtacttaaattgatagcacccacttcatgaagtaattgtttaatatcttcatggtattggctgataacttcatcactgacatgaatgagatcaccgaaaacatgtccatcagaacaaataataatgcgagcaccaggaggataataaagctggatacgttggcaaaaagaattaagaaaaatcaaagataagcgttctgccatatcaggggcagtaccaagtactttatttatgtttggtgacttggttgggaatgccggtagaatgaattcgataggctttttattcttgataaagtattcaattctgggtaattgtacagttttaataatctcttcttctttagctgaatttttcactggatcagtaaggtgcctgcgatattgcaacaattcgcgcagaatttgcatagaaatattattcaaggaaacattctcggatgtaatattgttagcggtgacactttgcataattatggtttctcgtgcttgttgtaaatatatttattatttaatttcttaaaaatagataaatagagatttagttaactggtatagacgaagtgtaagataacgcaattaaaagataatataatatttaagaatatctaataatctattttgtaataagcaatatgtttgaatgtaatttatatagttaatcaatatatttgattgattgttacattaaggcaaagtttgacggggttattaagataccaaaaaactggtacgatcactttcattgagtgctgattaaggataaatgggcgtatgtagatggataattcatcttcttcttttctagaatatattgttgttaattatatgaaatgattattgtataatgaaaaattattattacaacaggagagatatcattcagataaaaaataaatttttgtatcagattaataatacaggctgttattactattgtacccgttatctttcaagttgcttctttgttggctgcactcactcacaccggtcacatagtttgctatgcttgttatcttagaataaatattgatgaataaatcacagcataattattcaatagtgcagatgaagatgagtcttgattttgacagatttacgtggaagagacagatagctgtacagtgtgaattaaatcacagtacttccccacagactgatgatcaatcataggggaagtgaaaatgacttaagagcagatctgatgatgttcaaaagtatcaagtaattgctgaatgaattccaggcgtgccgttctttcgttcagatcaatgatgaatttaagtttagcggggccatccaaccgataaatttcaggttgtttttgtaacaggccgatcagataagttggatcaactttatttttttcactaaactcaatgaaccctcccttttcatgggcttctattcgtttaatacctaatttctgagctaacaggcgaatggctgctgagtgtaataagtgacgccccggatcaggtaatgtgccgaaccggtctatcaattcaaccttcaattctgctaattctgatgcgtctttggcgctggcaatacgtttataaaaagacaaacgcatattgacatcaggaatataatcatcaggtaacaaaataggcatccgcaattcaacgtcagtttgactattggtcaagtcttcaagtgagggtttgcggcctgcttttagtgcatcgacagcactttctaacagctccatgtagagagtgaagccgattgttgtcatctgaccgctttgttcttcacctaggagttcgccggctccacggatttcaagatcgtgagttgccagtgcaaaacccgcccctaaatcttcaagggaggcgatggcttccagacgtttgtgtgcgtcggttgtcattgctttcggatgtggtgtcagcaggtaagcataagcctgatggtgagaacgtccgacacgcccccgcaattggtgcagttgggccaggccaaaatggtcagcacgttcaataatgatggtattggcgcttggaatatcgatgcctgtctcaataattgtggtacaaatcagaacattaaatcgttgatgatggaaatcggtcatcacccgttccaaatcccgttcacgcatctgcccatgaccaatggcgatccgtgcttctggtactaattcttcaagacgcagcttcgctttctcaatattttcaacatcattatagaggtagtagacttgaccaccgcgcaaaacttcacgcagtatggcttctcgcaccagcaaactgtcatattcgcgcacgaaggttttgactgccagacggcgagcgggcggggtcgaaataattgagagatcccgcatactactcattgccatattgagcgttcgtggaataggggttgcggtgagggtcagaatatcgacatcggcacgcatggctttgatctgctctttgtggcgaacaccaaaccgatgctcttcatccacaattaacaaacccaggtctttccagcgcaagtcgctttgtagcaacttatgcgtaccaataataatatcgactttaccttcggctgccatttcaacgatttgttgctgttccttggcgctgcggaaacgggatatcatctcaatacgtacaggccaattagcaaaacggtcgcggaaattatcaaaatgttgctgagccaacagggttgtcggaaccaggaccgccacctgcttgtcattatggactgccagaaatgcggagcgcattgcaacttcggttttgccaaagcctacatcaccgcaaattaagcgatccatcgcgattggctgacacatatcattcagaactgcgttaattgcctgttcctgatctggcgttgtttcaaatggaaagctttgacagaacaattggtattgttcccaatcatgtttaaacgcaaatcctggttttacggcgcggtgagcataaatgtcaagcaactccgcagcgacatcgcgtactttttcggcagctttctggcgggctttgttccatgcctctccgcccaatttatgtaatggggcattttcatcagcaccccctgcgtagcggctgatcaaatgcagggaagagaccggaacataaagtttgtcgttaccggcataacttaagatcagatattcagctttgataccacctgcttccagcgtagttagcccctggtaacgaccaacgccatgttccaaatggaccactggctgactggggcgtaattctgcaaggttacggatcagggtatcggtattaatcgtgcgacgggtatcttgacggcggcggacaacacgttcaccaagcatgtcgctttcacagattagagccagttcattctttgtatcgataaaaccatgttcagcggcaccaatcatcaaaaagtgacctggctgttgtgcttgatgcaatttgctgattttaatgggtttaatctttattcgtgacaataattcctgtaacgtttctttccgtccttcgctctcaacagagaaaataacgcggccactgaattgttcaaggaatcggcgaagcttatccagaggtgccttattttgcgcaacaacggagagatcaggcagcagttgataatcaagatttacgtgactcgcttttttgctcaattcctctgttttaagttgaatgcggggccagttttttagcgctgagaataaattgtcagccggaagccaaagctcttctgggggtaagagagggcgcattgggtcaattttacggctctcaaagcgttgttggatgtcttgccaaaaacgttcggcggaatggtttatttcttgactgataagcaaagtgttgtcgggtagataatcaaacaatgaaggcaagggttggttaaaaaacaacggttgccagtattctatcccggccggtaacgtgcctttactgacttgctgataaatatgctcattgtcacgacggacttcaaaacgttcccgccactggctgcgaaacagttcaattgtctctttatcggttgggaattcatgagcaggcagtaggttgatttgtttaacttcagtcagcgtgcgttggctgtcaacatcgaaaatgcgtaagctgtcgatttcatcatcgaaaaaatcaatacgatagggatgctcacttcccatagggaaaagatcaagtagtgcgccacgagtagcgaattcgccgtgttcaagaacttgttcgacactacgatagccagcctgttctaattcagtacggagtttatcccgtgagagtctctgatctttgtgcataacgagtgcatgcccgttaaggtactcatgagggcaaacccgttgcattaaggtatttatcggcaggattaaaacacctttggtcatcgtcggcagacggtaaagtgtagacagacggttggaaatgatctcctgatgaggagaaaaactgtcatacggcagtgtttcccaatcggaaaggagatcaacggagcagtcggtaaactgatggatttcatcatgcagacgtaaggcgttttgcatatccttggttatcagtacgacagggccttgatggcgttcgataatttcagcacactctaccgcgcaagcggcaccagtaagttggcctaattgacggttatcaccgcgacgttcgggaagttcataacgatattttgaggacataggcgtcaatgtgttctctatgattcagtccattcccaacaggctttcgacacataatggtcttcaagtaaacacgctggcgggttgagagaaaataaaaaaaccacagaatctggatgttggtggttccataaaatataactaccctttattatccccgaacactttgctttggcaacaggggcgtaacagatttcatgtttcaatctgtctcattatttataggtttgcggtatatgcgtggtcgggcggctgataaatttggtcggtttgtttcctggctgtcaaccattggcattactctcggtgttgccgcattaattacagtattgtctgtgatgaatggttttgagcgttcactggaaaccagtattcttggcttgatgccacaggcggttgtgacgtcggtaaacggctcgctagacccaaaagcgcatcctgccagtgaacttgcggctctcaagcaggttgacaggatgacgccattggtgatgggggatgttgtattgcaaagcgcccggaatgtcggtgttggtgtgatgctgggtatcgcttttgatgaatatgagccgctgactgaatatttaaccggcgcttatcgtcatcaacttgaacccggtagctacaatgctattttgggcgaaaaactggctggggagcttggggtaaaacgcggtgatcgcattcgcctgatggtgcctggtgcaagtcagttgacaccaatggggcgtattcctagtcagcgtctatttactgttattggcacttttgcgtctaatagcgaagtcgatggcacacagattctggttaatcagcaagatgcagctcgtctgatgcgctatccaccaggtcacatcactggctggcgtctctatctctcagaaccattggctgtagatagtttgagcttacaaaccatgccggaagggttgttatggaaagattggcgcgaacgtaaaggtgagtttttccaagcggtcaggatggaaaaaaatatgatgggcttattgttaagcctgattattgccgtggctgcgttcaatatcatcacttcgcttggtttactggtcatggaaaaacagggagaagtggcgattttgcagacacagggactggtacgtcgtcaggttatggcgatttttatgatccagggagccggagccgggatcatcggcactttactgggaactgggcttggtgttctgctttccagtcagcttaataacttaatgccactgattggcttattgacctcaggtgttgagctgcctgttgccattgagccgctacaggttgctacaatcgcaatttcagcgatggcgattgctctattgtctacgttatatccttcctggcgtgctgctgccattcaacctgctgaggctttgcgttatgaataatcaaccactattgttgtgtaataatctgtgtaaaaaataccaggaagggcaagtactgaccgaagtgctgaaaaatgtcacttttgctatcaatcagagtgaaatgatggcgattgtgggaagttccggttcaggtaagagtacgcttctgcatttgcttggtgggttggatacaccgacttctggtgaagtcctttttaaagggcactctttgaataaaatgtcctccggagccagagcagaactgcgaaatcatgaattgggctttatttatcagtttcaccatctgttgccagattttaatgcggtagagaatgtcgctatgccactgttaattggtggtaaaaatcgcggtcaggcacagaagaaagcattcgaaatgctggcggctgttggtttggagaagcgtgctcatcaccgtccatcagaattgtcagggggagaacgccagcgtgtggcaattgccagagcgttggttaatgaaccttctttagttttagcggatgaacctaccggtaacctcgatttacgtaatgcagatagcatctttgcattattgggtgagcttaaccggcagcaaggcacggcatttctggttgtcacccatgatttgaatctcgccggcaggttaaatcgtcaggtggagatgcgtgatggctatttacaggatgaattgaccgtgacgggagcgttgtaatggcgaatttgcctctctctttggtcactgccttgagatttagtcgcgggcgtcgccgtggcggtatggtatctctgatttcggtgatttctacgttagggattatgcttggtgtcgctgttctcatcattggtctaagtgccatgaatggttttgaacgagaattgagaaaccgcatcctttctgttgttcctcatggtgaaatttatacggttcatcagccttttgaacagtggcagcctgcattggaacgggtaaaaaacaccaccggtgtggttgcggcttcaccttatattactttcactggattgatggaaaaaggtgccagcttgcatgctgttcaggtgagaggggttgatttagccacggaatctcaggtcagctcattaccacaatttgtccaagataatgtctggcaaaattttcaggcgggtcatcaacaggtcattctggggcagggagttgctaatgctttaaaggttaagcagggtgattggttgactgtcatgatcccgaacaatgatcccgaaatgaaactgttgcaaccaaaacggattcgtttacaagttagcgggatttttcaattgagtggtttgcttgatcatagtttggctttggtccctttggccgatgctcaacaatatttagattatgggcaagggatcactggcattgcaatcaaggttgatgatgtatttgccgctgatcaacgagtaaggtctgccggggaagcatcacaggaatatgtctatatcagtagttggataagaaattatggctatatgtatcatgatattcagatggtacgtagcattatgtatctggcgatgattctggtgattggcgtggcatgttttaatatcgtttctaccctgattatggcggtaaaagataaaagcagtgatattgctatcctgcgaaccctcggcgctaaggataggcaaattagagcagtttttctctggtatgggttattgacggggatgacgggcagtattgctggtgctgtagctggcgtgttggcatcactgaatctgacagcgcttattcatgggctggaaaagctgatcgggcatcaatttctttccggtgatgtttacttcattgatttcctgccatctgagttgcatggcatggatgttctgtatgttctggcgacggctctgattctgagtttattagccagttggtatccggcaaggcgggcaagtagacttgatccggcacgaattttaagtggaaaataattaatctattattggcatgagctaatcaaaacgttatggtataaaaaatagaaacctaagcaacatttaagaaatcttgaaggaaatcagtatgcgagttcgtcgtcggcttagtcggcttggccggcttcgtaaggttaagcgtttgaggcatcagagatttcgtagccggattttttatagggacaatcgattggcgcttaatatgaaaaaaccttacatcgtggtattgacaggagccggtatttcggccgaatcgggtattcggactttccgttcctctgatgggttgtgggaagaacatcgggtggaagatgttgctacacctgaaggttttcagaaggatccagaattggtgcaggcattttataatgctcggcgtcatcaacttcagcaatcagagataaaaccgaacgtagcgcattatgctttagccgcgctggagcatgaacttggcgataattttttgttgattactcagaatatcgatgatcttcatgagcgggcgggtagctatcgcacggtgcatatgcatggtgagttgttcaaaattcgttgttgccaatctgggcaagtgtttgagtggacagacgatttaacgacagatgaacgttgccattgttgtcagttcccttcaccattgcgcccacatgttgtttggtttggtgaaatgcctttggagatggaacagatctattctgcactggctcaggcagatatttttatcgctattggcacttctggccatgtttatcctgcggctggatttgtacatgaagctaaactggcaggggcgcacacggtagagctgaacttagaaccgagtcaggtagaaagtttatttgatgaaaagcattatggaccagccagtaagatagtcgatgagtatgctcgaaggttaattgatagtattaaagaatttaaagctgatttgacgcaataattattgtgtttctcttcctcataatgggtaacaaaatccctgggggaagagaataatggacagattactagaacgtttttttaaatacatatcttttgatactcagtcaaagccgtcagcgaagacgattcccagtagtcatgggcagctcgaactcgccaaagcgctgaaacaggagttgatcgaattaggtttttccaatgtggtacaggatgctcatggctgtgttatggcaacattacctgccaatacatcttggcctgtacctgctatcggttttattgctcaccttgatacttcacctgatttttctggaaaaaatataagtccacaaatgttggaaaattatcgaggtggtgaaattgcgctgggggcgggtaatgaagtgttatcaccggttatgtttcctattttgcataatatgttggggaaaacactgattaccaccgatggtaaaacgttgcttggtgccgatgataaagcgggtattgcagaaatcattactgcaatggttcgtctgaaaaatagcaatatcttacatggtgatattcggattgcgtttacacctgatgaggagataggtaagggagcacgctattttgatattaattcatttgatgctgagtgggcatataccgtagatggtggtggtgtaggtgaactggcatttgaaaatttcaatgcggcggtagtaaccgttaagattgttggtaataatgttcactctggtagtgctaagaatgtgatgatcaatgctttatcactggcgatccatatccatcaagcattgccatcggaagagacaccggaacataccgatgggtatgaaggcttctatcatttgcaacgtattaaaggcacagttgagtgtgctgaaatgcactatatcattcgtgattttgatcggaataacttcgaagaacgtaaaaagaagatgattaaaattgctgaaaaagccggtgagggattgcatcctggttgttatatcgaactgactatcgatgacaattattacaacatgcatgatgaagttatcaaatatccgcatgttattgagattgccaaacaggcaatgctggattgtaatattgaacccattattaaaccgattcgtggcggtactcatggcgcacaattgtcgtttcgtggtttaccttgcccgaatatattcatgggggggtataattatcatggcaaacatgaatttgtttcgttggaaggaatggaacaggctgtcagtgttgttatgcgcattgctgaattaaccgcactgttgtctaaaaagtcggaaatgagtcaggcgttttgcagtaggagttaatttgatcggatattaacggcaaaccctggcactaccagttcttaacaaactctgcggaattttccttcctgaatgctaattgagagcgaagcgaacttaagaagtccccactataatcacttgtgatttagtggggagaaaatcaatattattgaaatcaacctcttgggatgaggtatcaatcattaaagtaccagtaaccactattgaccaatgcagtgagcagtctgataaaacgaacatcatctatcgcttcaccaagcatttctgcattaatttcataatggcagcaaagaacatcagccgctttaatatgaggtgtatctattaattcaccgttaacaaagcactgatcaccaaccctgataacccgtaatccgttaagacggtggagattttcaccttgtttcattaattcataaatttcatcactttcataaggtggctctggtggcgcaatatcaagttcatgccgtgactgagaaatgaattcaccaaaccattgttggaaagtgtcaggctgtgccaataactcgttcatcatggtgtgtagcgctgataattcatgcggctggaccagcgccggattttcgcggaaagtcagatcggcatcgctataacgatagctgcctaaatcattagccagcacataatcggcgaagctactgaacagttcacgggaattgggggcgcggaaaccaactgaataatttagtgaatcttcgatggaataaccttcatgaggaaatcctggtgggatatagaggatatcgcctggttccatctcttcgtcaataacggcactaaagggatcgacctgtaatagatcggggtgagggcagcgttgttccattggtagcttttccccaacgcgccagcgacggcggcccattccttgaatgataaacacatcgtattggtctagatgcggaccaacaccaccaccgggaacggagaaggagaccatcagatcatctatccgccagtcagataatacgcggaatggttgcattaatgcggcggaaggacggtgccagtgattaaccgcttgtaccagcagtgaccactctttttcacctaaatgatcgtaactttcgaatggaccatgagagacatcccaacggccatttttctggctgaccagacggcagtcaacttcattttccatagccagccccgcgagttcatcgggagtaaggggatcaatgaattgacggaagccttgtttaatcagtaaaggccgtttttgccaatgattatgcaaaaatgcctgccagtccagattcaactgatagtccatagtgacatcctgagtgtgaagtgaatttcagggtattataacgaatagttaaactcagtatcagactacactggcatatttaactaatcatcatcattaatttgctggcatcggaatataacgcaaattctggcaccaccaagtggactgtcactgatactgatatcacctttatattgttcgataatttcagaagcaattgacaatccaagcccttgaccaggcttcaaagtatcaacacgttgacctcgttggaaaatgatgtcccatttttcaattggcacccctggaccatcgtcgtcgacaataatcattaccgaatcgtgatcaatcgtcacagagatctcaacaaatttaaggcagtacttacaggcgttttccaacacattacccatgacttccataaagtcatttttctcaccaagccaggtgatctccggtgagacatctaacgtgagactgacacttttacgctgatagacttttgttaaagcgctgcataggctatctagtaaagcaggaacagaagagactttccgcataatagtactgtgttcactgcgcatactggcacgatgcagataatagcctatctgctgagaaatacggccaatttgctcaagcatgataggttctgcctgttgaatagtcatttgtttgctgtcacgcaaagaacggagagttgattgtaaaacagccagtggcgttttcaagctgtgtgtcagatcagccagtgttgttcggtattttgtatagcgattgcgttcattattgagcaacacattaaggttacgaactagcccccgcagctctgttggtggattttcatccaatttttcccgctcacctttttctaatgaactgatctgatgaataagcgatttaattggccgtaaactccagtgtgcggccagccagattaatgggataaccagaataagattggcaatcaatacataaccgaaccattcccacactagaactgttttttgtaaatcctgtggaatggtatcgatgacgacaatggttaacgctggcaaatgagctgttgcactatatctgttgacagagacggagtgagttagctcattatcttcattttcgtcaagtgaattaagtttacctaattgtccttgtgtgttagccgagttttttagcaaatcccggctgctttttaggtcagtatctagttcatataaaccgtcttcttttaaccattcactaggaatagagttttcgacttttgggatatggtgttgacgccagaggatggcacctttgttgttataaatcagaaccaatgatgggttattcagtgtgaaattgggggggactgaaatatctagctgattgttattccactgagcaaggctgaaaaatagattactctgactacgtagcagtgtataagcagttttatcaaaactgaccaggtaaccgacaatggcaacaataccgtaagacatggtaagagcaagaataaccgcagcagttgccattaaaaaccgggtacggagtgagaaaggctgctttttgtgcttaagcacttttttacctatgaaagttttacacatcgaagcgatagccttggccccggacagtcacgatagcttcataaggccaaatatctaatattttttttcttagtcggccgattaagacatcgatggagtgaccttcgcgcagttcagcatcgggatataattggcgcattaatgactctttagtgacaactttatcgctattacacatcagtatttcaatgattcggtattcaaacgccgttagtttgacgctctccccgtaaactgtaaattccttgcgtgacagatcgattttgaaaggtgggaattcaataatctgagaaaccagcccattattacggcgtaggagtgcctgcatacgggcaataatttcctcaagatgaaagggcttggtaacataatcatctgctcctgcatcaagaaccgtgactttttcttgccagctttcgcgggcggtcaaaacaagaatggggagtttttcatctttttggcgccagcgacggatcaaactcaaaccatcttctccgggcaaaccaagatcaacaatggcaatatcgggttcgctctcgaccagatagtaatcggcttctttggcgtttgcagcggcatcaactagatgaccggtgtcacgaagctgtaccgttagatggtgacgcagtaacatgttgtcttcaacgatcaatatccgcatggaataattcctctccagcaggcagttattgtaataatcaattcattcggactattatatagacaaaactgccagtaaaaaattcaatgtcatggttctgctgagtatgttagatacatggatctgtaacagcaagacgttaagtggaaatagagaatataactttagagtatgtttgggattggtttatataaggatagcaacagacggatgttttatccgtctgttgaatatcaactacttcaattcatcaaccagtgtgattgcacggccaatataatttgctggcgtcatggctttcaatcgtattttctcttcttccggtaaatccagtccatcgataaaggttttcattccttcaccgttgacgcgtttaccgcgggtaagttctttgagtttttcataaggcttttcgataccatagcgacgcatcactgtctggataggttcagccagcacttcccagtttttatctagctcatccagcaggtgctgctcattgacttctaacttatttaagcctttcatcgtagattgataagcgatcagagcatatcccaggccaactccaaggttacgcaatacagttgaatcagtcagatctcgttgccaacgggaaatcggtaacttgcttgccagatgaccaaataccgcatttgccagccccaaattgccttccgagttttcaaaatcaattggattgactttgtgtggcatagtggaagaaccgatttcaccggcaaccgttttctgtttgaaatggttaagtgcgatgtaaccccaaatgtcacggtcaaaatcgatcagaatcgtgttgaaacgggcgatagtatcgaacaattcagcaatataatcatggggttcgatttgggtcgtgtatggattccatttgatgccgagtgaagtcacaaaagtttcactaaactgatgccaatcaacctgtgggtaagcggctatatgggcattatagttacctacggcaccattaattttaccgagtatttcgacttgttccagttggcgatactggcgttccatccggtgagcaacattggcaaactctttaccaaccgtggaaggtgtggctggttggccgtgagtgcgagataacagtggtaagtctcgatattcactcgccatttttttgatggtatcaatcatctgacgccattggggtaaaagtacttcttctcgggcggtttgtagcatcagcgcataagctagattgttaatatcttcagaagtacaggcaaagtgaataaactcagaaacttgatgtagtgcaggaatatgtgcaactttctctttcagaaaatattccactgctttgacatcgtggttagtggtgcgttcgatagttttaatacgcattgcatcctgttcattgaaatttgcgataatttcattcaggtaagcgtttgcgtctgtatcaaacgcgggaacttctttaatttcagcacattctgccagtttttgcagccaacgtacttcaacctgtacgcggaatttcagtaagccaaactcactaaaaatggtacgtaatacgctgactttatcgccgtaacggccatcgatcggagaaacagcagtcagtgaggataattccattggtagcaactcccggattttatttaacaatgagaaagaatatctttcgcctgttggatcagacgttgacgagaaaacattaattgcaagcgaccaccgccaacttgttgccataagaccgcgcaacggacgccagccagtaaaatagcccggactttcgcttgtaccagtggattgcgcaggatatcaggggaaccagtcacttggatgcgtggacctaatgggctgataacatcgacataaataccggccaacgcattgaacatcccttctgacatgggttcgaaatatgcctgttgacgttcaagtaaactgatacggttacccaatgcatcggaagctgcctgatttttcattagccggcgctccaatgctatcagactcaagatatagcgggtaagatcggcagaaataccattgttagagctattaaacatccctagcattgcgttcagcccaattttcagattgcgttcatgattgccgaacacatctaaaacagatgccgggttggtgtttaaaatgctattaaccatggtggtaacagcatcagtatcacactggttttcatgagacagttgttgtaccaagcgacctgactggcaaattcccgccagcgctagtgtaatgttgtaatgattctttgccacaattactcctgcaaacgttgttcgatcactccaccgccaagacaaacttcaccctgataaaagacggctgattggccgggggtgactgcggcgacaggattagcaaaatggacttctattttatcttcgcttataggggtgacagagcaaggaatatcttgctgacgataacgtgttttgacgacgcaatggattttttcagttaatgtctgtctgtcaacccagtaaagttgctgagcaataaggccggtagacattaaacgggggtgttcatgcccctgtgccacgatcaggatgttgttctgaacgtctttatctatgacataccacggctcttcgctgccttctttcgttccaccgattcccagacctttacgttgacccaatgtgtggtacatcagcccctgatgttcaccaagggattctccatctactgtcataatcgggccaggtttggcgggtaaataacggccaaggaagtcacggaatttgcgctcgccaataaaacagataccggtggaatcttttttctttgccgtcaccagaccgattttttcagcgatacgacgaacctctggtttttccagttcaccgaccggaaataggctttgagcaatttgctggtggcttaacgtgtataagaagtagctttggtctttattattatccagcccacgcaataattggcttttaccgttaatatctctgcggcgaacatagtgacctgttgcgatgtaatccgcgtttaaatcctcagcagcgaattccagaaatgctttaaacttaatttctttgttacatagaatatctgggttaggtgttctgcctgctcgatattcagcaagaaaatgttcgaaaacattatcccaatattcggcagcaaaattgacggtatgaagttcgatgcccaacttatcgcaaacggattgggcatcagccagatcagtcgcggctgaacagtactcttcatcatcatcttcttcccaattcttcatgaacaagccagccacttgataaccttgctgttgtagcaaataggcggaaacggaggagtctacaccgccggacatgccgacaatgacttttttctggctgttatctgacatgggaatctcactggagaaaaaaacaagcgccgtactttaacacgttgcaaatcggggtgcatcaaacgtatcactgttttgccattaaataaacggagaaacataactatccagtagagtgagaggatgcttttcgttttgcaggtaacagcgaatactttctgcgacgagtggagaacgaagataatggctactgaatatttgttctgctgtaacccaatggcaacaatcaatatcacggtcttgcggatggggtacggtttgttgttccatttcaaccagaaacagaaaacggataaagggggtgccgtctggtgcaacccactgatgaactttcagcagtgcttgcggcttagcctgaatcccggcttcttcccataattcgcgttccgccgcttgtaacaatgtttcaccagcctcaagatgaccagcgggttgattccataatgctttgccattaattgtctcttcaacgaccaggaatttattttgggcatggacaatacaggcaactgtgatgtgggggctaaacaaaattaatctccttccattcaccgggtttcatcttgcctaatggtaagtttcccatactaaaacgaatcagccgaagtgtaggaaaaccgatatgtgctgtcattctgcgcacttgacgatttcggccttcataaagtgttatttttaaccagcttaccggaatatttttacgttcacgaatcggtggatggcgactccagagccatgtcggttcatgaactaactcgacacctgcgggtagggtaggcccatcttttaatatgatgccattgcgtaacttatcgagagagatttcatcgggaacgccttcaacttgcacataataaactttggctgtttttttatgcggttggggttagctgtgcttgaagtttaccgtcattcgtcagaattagtaatccttcactgtcacgatctaaacgcccggcagcatacacattagggaacgggataaaatcttttaacgttgttctgcccatttcatcagtgaattggggtaaaacatcataaggtttgttaaatatcaacactcgacgaggttctattggttttttgacagaatgcgatatttttctttggctgaatcggttaagtttgtgttttttaatagcgatatttgtcatcatagatcactgaataaaatggaaggggcattatacattaatctgctatcaattggcgtttgcagaatattcaagtagtattgacacgtcccttacaaaaaattaacaaggtattacgcttacttgaaaggagaggttaatggaaagcaaagtagttattccggcggaaggtaaaaaaataacagtcgacgctaaaggtaaactggttgttccgaataacccggtcatcccttatatcgaaggggatgggattggtgtcgatgttacccctgcaatgttgaaagttgtcgatgcagcggttcagaaagcctatcagggtgagcgtaaaatttcctggatggaaatctacaccggtgaaaaatcgactcatgtatacggtaaagatgtttggttgccggatgaaacgttggatctgatccgtgaatatcgcgtcgccattaaaggccctctgacgacgccagttggtggcggcattcgttctctgaacgtagcattgcgccagcaattagatctgtatgtttgcctgcgtcctgttcgttattatcagggaacgccaagcccggtcaaacaacctgaattgaccgatatggttattttccgtgaaaacgcggaagatatttacgccggtattgaatggaaagcggggtctgttgaagcggataaagtgatcaaattcctgcaagaagagatgggcgtgaataaaatccgtttcccacagcaatgtggtatcggtgtgaaaccctgttctgaagagggcactaaacgcttagttcgtgctgccatcgaatacgcaattgataatgaccgtgaatctgtcactctggttcacaaaggcaacattatgaagttcaccgaaggtgctttcaaagattggggttatcagcttgctcgtgaagagttcggcggtgaactgttggatggtggtccttgggtaaaaattaagaatccgaaaaacggtaaagagatcattgtcaaagatgtcatcgcagatgcgtttttacaacagattctgctgcgtcctgctgaatatgatgttattgcctgtatgaacctgaatggtgactatatttctgatgcactagctgctcaggttggtggtatcggtatcgctccgggagcaaatatcggtgatgaatgtgctctgtttgaagcgactcatggtacagcacctaaatatgccggtcaggataaggtgaatccaggttctgtgattctttccgctgagatgatgttacgccatatggggtggacagaagccgcagatctgattgttaaaggtatggaaggcgcgattgccgcgaagactgtgacttatgatttcgaacgtctgatggaaggggctaagctgctgaaatgcagtgaatttggtgacgcgattattcagcatatgtaatctgtcatcttgcgaagacttcacggtagctaatgcttccgtggggttttctaaattttgccagtgagtgtatactgaaagtaatattcgttctgtctaatagagagagggagtaaaaaatgagtggctcagatgataaaaaaatagagtttaatacgagcgatgtactgaatgctctcttacaccgagggcagaatatgcaacatcttgcaactcaggaaagtgttgataatctgcgccgtgagaccgaggttaactttgcatcacttgataagtgtttcgaatctattgataaacgctttgaatctgttgagaagcgattcgaattaatagatagacgcttcgaatctatagataaacgtttcgatgttatggataaacgttttgaatctatagataaacgttttgataaacttgaaggtaaatttgatcgacttcaatggtttattgttgcggcggcactggcgttgctattcaaagaatatatttttaaggcggctgctgttatccagtaacttgcaatctcctgcaagttactgctaactcattcttctatccattatttcatcccttttgctacggtgttttccagctcacactgaaacggtctgagctgtgttgaattcctttgctctaataacccattattatgaagccatattcatatttatgaatcattcatgttaatacacagaaatttgattgataacaatgtgtcgtttttggcccttttctaatgaatgttagtagaaacagatcgaaatgtttggtcgaaatgagatatatatttctctttttcatacagtgtttgcaatctttgctcaagttcattaatcgatgctttaaggagtggatgttgtgtttcaggtaataagtcattgagtggtgtcaaaacaaagaagcgcttatgaaacctcggatgaggaacaatcaggttctccgtagatataaccttgtctccgtataagagtaaatcaagatccagcgttcgaggagcattgacaaacgagcgtttcctgccgttgagagtttcaatacttagcaattcggtgagcaaaacgaccggtgttagcgatgtttcaaagacaacaacggcattcaagtagtctggtgctcctgtactgtcaatcggtgctgttttatatatcggactaaatcggaagtttgtactttccttcaatgccagcaaatgattttctgctgttaacaagttgtaataaggctgactaagattacttccaattgctactgctgctatgactttttcgtgcttcatatcatatttactcgcaaaaaattaaatcacctgacacttattattccatcatgaaaccgtatgttgctagcgtggaacttttatctggaaagtattgcaccgccatcgatcctgatgatgtgacctgtaatatactctgaaattgcaagaaatcgtaccgcctcagcgatgtctttgccatcaccaattcggccaagggggatttttttcaaagtggtgaatttttcgttatcgtccaatttattacttttttcaggccacatgatcgttcccggagcaacgccattcacccggatattgggtgctaactctaaagcgagggcttctgtgagtagtgcgaggcccgcttttgcagcacaatagacaggatatccttttagaggacgcttagcattgatatctacaatattgactatgttcccacgaacctgatgcagccaaggcatggcagtttggatcagaaaaaacggtatttttagattaatatcgaccaaatcatgccattggctatgggaaacagatccaatttctgttgggtaataggttgaggcattattgactaatatatccaattgtccccattcgcttattgctgcatttatgatgggttcacaattgcataaattactcagatcggcttgcacggatattgtagattgggctcgtatcgaatttaattcctgaacgagttggttggcctctaattgggatgtattacagtgtaccactatattgaatccctcagcatgcaatgtttttgcgataaccgcgcctaatcttctggcagcacccgtgatcagtgcaactcgtcgctttcgcattgatgtagaatgttcatttttcatattgattttccgtcattaaagtagatctcacgaatacagataaattaagtttccatatatttgtgaacaatcatttcattgatttttacccgatttaaaaatgaaaggcgtctggtatcatcaagaatacgacgagctatactcattaccacattataagcttccgataaccagtatttttcctgctccatatctccacagctgattgctacggtatagtggttcatgtagatctcctgtgcgcggagagcgggtagccatcccatgtgaatgagcatatcaatagcagattggctatattttttggcggcgtcaaagtcatttcggctgagggaaatttgtcccataagcgataaagaaaggatttcgctacgatatattcccgcttggtgtgcttcagagatattttcctgcaagatttcttcggccaaggagatattttgtttggacggactactttctcgttgtaaaagaaattctgcatagtaatttctgacaagcgttatcaacggtaagctgcgagctaatctgctctctttccaccctgttatgaggtgttcacgtgccttgtcatattttccccattccatatagaccttgccaaggagtgcacgattatttgcattccatgcgtgtggcgttttctcagggatgaaatattcaaggcagctgagtagaagcgactcagcggtttcataatctcctagactgatatggacttgtgccaggtagttgcagaagatggaaatgtcgaatttgatgccgaggtgcaggcttgactcgtaaactttggacagatgtttcattgctgcttcgtagtttccaaaatcgaattcgcaaactccatgtatcgaagaaataaaatggatatgcctttggttttccaatgacagttcatgacttactggactctgatgcaggatatcgtgggcttgccggatcaattctctcccatgcttaaggctgattttcatagtcttgtggcctaattcagctaatgcaagggctttgatatagggagtacaactgttttcagctaaaatgactgcatcttgtattgccaagatggctgcttccgatgattgtgtattggcgaggtactttcctttgagaactttcagtttaatatgcgtatcaagtgatattttcttagtataataagtttctgccaaggagaatagatcatgtcttgtccatttctcagtgaaagggagatggcattgttgattataaatgtcatgtataaacagtagcatataaatacaatctagagtgatttcatcttgcagacaatacggttcatttgcagccctgagctgtgtgtaacaatatttggcgcagtgttcgaaatcttgacgatttaatgcttcgtgtgctaatcggtgtaattcttgagctggtatcatgcttgattactcaatggtttcacaagtatctttaagtttaagcagcgtaatactgctctccgaacatgctttccgaaggactgctgtgaatgatcgaactatggatttcacggttttctgttgaaagagatcaacgttatatactagctttgcatatatattttcatgctctacagatatccatagcgtcatatctaaaactgtaccgtcaaaaggttctctgccacgccctatatctaagttcatgggtatggtctcgatgtttcgtaaggtcaattttgcgttgggaagcatgattaacatgacctgaaagatgcgtgatcgtactttgtgtttttcataaggagcgagtgcatcggcaattgtgccgaaagaccaatcaatattatcctttgcgtccagagtgattcggcgtatcgatttagtcagtaatgtgaatgcttgtgtatcttcaacgaatatgcgtgcagcccaattgtttgcaaagaaaccgagattatttccatattccggttgtctgttgtccgccgcagtgccaataacgacttcttgttgggatgaataatgggaaagaacaattgcccaagctgacataagaaccgtatagggtgtggctcctatatggcggctgaattcaaggacaccaatctcttgtgggatctgaaacacttctgatgcggaacatcttgtttgatagatttctgattgattgcatatagggagagcgagtagggaaggtgcaccttccattttatgtttccagtaacttatttgacgttttacagatacatcacggatatattgttgttgccagttagcatagtggcgatattgtcgttgtagatcttttggcaaagcgactgatttgtcaccgcatgcatgggcatagaaagttgataattcggcagcgagaattcgaatagactcaccatctgcaatcaagtgatgtagacaaagtgttaaaacctgctcgtctgttttgagaagaatcaggcttacgtgaaacagccagtcgcctgcatgccagatacattgtgaattacgttgtaaggcggacattaattgttcgtcttgaccttctttggttattgcagaaaggtcaattatctcaattggcagatcggcatcttcttcaaagtacccaatcaatgaagcggtggtccaatcgaatcggctacgaaggatttcgtgtcgttttgttaggtgatgcagtgcttgccttaatgcctctctatcgagatgaccaatgagccgataagcgcggaaaaggttatagtcagagggatctccatcagcgcataatttgagtaatctctcttgttgaagagagagtgtggcgtagttatccggcgacgcaggtaaaagatcgtcaatgtttcgtggtgtttcattaatcagctgtgtaattttctgggtgaatttttgaagggtggggttttcgaaaagcaatcgcagaggtacagcaacggcaatatgagccgcgacttgcgatatcgtgtgggcagccttcatcgagtcaccgccgagtttgaagaaattgtctgatggattcactccttggcattcaagctgcgattgccaaatattgctgatatcgtcagctaattttaaatttgtcggggaaaagcgattgtgaaccggggtcggttgctgagcttctgtatcggataagtgtaatttagtggcattgctggtgagtagtcttcgtttaaagtcatttaaaaattgtgctgcgatggcaccagtgatgactctatgatcgaatactaaggtgagtgacatggggtatccctcaagatctttatcacctccgattcctaggatggcgcattgctgcttatttaacatgggctgaaaatgaagaacattctgaccagacaggtcggaaacggtaaaggtcgctcccgtaacatcttcaaggcttaatttgttttcatggtatcggcagacataatcggcgacagcggcttccacatttggcaatgctaattgatttatttgccgaatcacggggactcgcaggccatgattcatgtcaattgcaacgccaatattcactgtgctgtagcgatgaatccgttgtttctcataataagagcgtaattgtggccagtcttgcagtgtaataccgagtatccacaaaagataagggaaaatttgtccactggaatttgtatcatttcgcaatttttcccgtagattgatggaattgaactgcacggtgatagaactgggtaatgagccattctgagcgtcagagagaatgcgtatttcagcttgtttcgaaacttcgatcggttccgtagtcgtgatattttcgactaatgataaaatcttatccgattcgtgggggtcagctaatagtgtagttgtgaatggcttttgaatgtgtttttccacagcgaaatgttgtctgaggtaatccaaagttatgaggccgctgaatcccagttttgaaggattaattctgtggtgttcgagatatgcggtagcggccttagagaatctggccgttgcgttgcttctatccacttggaacatggatgcgtcgggatcttccttggttggggtggaagtaggttcttggacgatttcagcgataacatttcctacagcaacctcatctcctgcttgatacctcttaagcagatatcctgacatagggctatggatttccactatggctttggaagcttctaccctcgcgatcatttgcccgacagtgacataatctccctcttcgaccaaccattctgagattaacattgtctcgtcgttggcgcttagcttctcaagaataatggtatttttcataatatacctattgtggtcgtattaatttcaattaaagacatttattgttgaggctcagcctctgatatgtatgccttaagaatacgttcaatcagcatgtcttttcctggaatcataaggttttcaagggctttacttgagggtatcgccatactggaaggatatatgcgtattgtacgaggtaataacttacccaaaatttcagtcaattgagcaacgacttctgaaccgaaacccgcaaatccctgaccttcttcaacgataatggcgattttgcatttcgatacgagtttgatatatgggattacactaaacggatatatctggagtgggcagataacttgagcaatcacatcgtgttctacgaaaagttcttctgctacatctaccagtagatcgctcagcccaccataaccgaagattacaacgtcgacgtttgttgacagagggcttacaacgaccgctgggaatggatcgtcagaggcatagcttgtgaaccccaatggagcatttcgaatgctcttggtatagaggattttattttcaataagaagaacaggaccttcctcctgttttgcaagtgttttatagactattgccggatcgataagattgttaattgccagtatcgtcagacctggtattcccatgaaatgcttttccagagtttgactatgggtaggcccgtaaccgcggccagcgcccattggtgtccggatcactaatggaactttcacctgatcgttgtacatgtccctgaacttggctgcgtgattcaatatttggtcaaacgctaaagtcaagaagtcgccgaacatgatttccacaaaaggacaatatccatgcatggcgagcccacatccgatgccgacaatagcgctttcggagatgggagtatttatgacttgttcgggaaagctatcggacaggccatcggatatcttaaatgcgccgccataaggcgctttcacgtcttctcctatgaacaggatatttttatccagctccatgatttccaaaaatgccttattgattgcacgggatagccgaatcttagacccctggctgggtagcggatgaaatgtggaagatcgcgattgcaattgtgtttcagcgccgtaaaacggtgatgagcgagcctgttttgcctttcttattgcgtcatttactctttcttgaactccggcgacttctgtctccaattcagcagcacgttcacgcagaatgacattgatgggatcgatagtattaaagtgttcgatttcatcgatgtttcttagatcgtctcctttggagtgagctttgagacggtaagtatcgatttgtagaaaagcggggtgtctttggtttctagtataatttatcagctcttctgtctcagctatcagatgttcccaattccaaacatcagatttcgtatatctcatgccaaaagcctgtgcgcgtttgcttatgctgcctgataatgtctctgagatatgagtagattgtgcgtattgattgttttctaacacgatcaatagcggtagatcccactttgctgcgatatttaatacttcatatacgacaccctctccgagagtgccatctccgataaatgctattgagatggaattatcatggcgtaacttcttggcgaaagctgccccggttgctaccggtaagatcccgccttgaatcccgttagaaaaaaatccctctttgcatagatgttgacttcctccacggcctccacacacgccggtctcttttcccatcacctctgcgatcagtcctgtaacatcgcctgtccgcgaaagaaagtggccgtgacatctatgattggagaatacccagtcattttttttcagaaacttgcatactattgcgcctgttaactcttgcccaatgcatgtatgcactgttccatggagctctccagtggaataaagacgtaacaatgcttcttccgtttctcgtattagtagagatgtccgtaagatatcgctgtccatattcgtcaaccctcattcatcgtgattcgttactttataagcgctcatgagtagaatcggatgtcacaacatttcttgagtcatattcaaaccggcccattgcctgtgaataagctttgagttcctcaaaccgttgactgagaaatgcgctgcgttcttcttcatgaattgactcggcattgcaatctgtaaaacaattgggtgtttcatagagtctgatgtgatgaatttttaggttatcccattcattaaaaagaacctccatagtgaggaatatttctttggcaatattctcaactgttggattacagtactccccatgacgatttaagctcatcagtcggaatttactgcgtgtagcatgaacagcggatataaagtctgcatccttgggattaagaattgaggcgtgatccagaaactcatcaatccatgcggcacctatgcgctttatctctttgaaatctatcgcgtatccaattggttgcatctgttcaaatgagaaagtaagttcatacagataagtgtgtccgtggatattgaagcatttgaccctttcattcattacgcgatgagcggaatcaaaagagcctttgcgagtaatatattgaattgtcatgcaatacctctaatcaattcatagaactcttgttttgccggtgaatcagcttcagcgaatgcacctgaaaacatttgtgtcttcatacggcttctctggtggcgtacacctctgcaacgtacacaattgtgcgatgcatcgactaatactgcgacgccttggtttctttcacatacttggtttactgcattgtggattgctgctgttaaccgttcttgtatgagcccacgtctgccgaaatgttcgactattcggtttaactttgacaagccaagaacacgcccgtattgacttggcatataggcaacgtgaacatagccactgattgcttgatgatggtgagagcacatggaatcgagcgctatccagccgtcgaatacaatgccatcgtagttatctgccggaaatgtagtgatgggtcccattggtttgtatcggcctttccataggtcaagaacataagcctttgcaacacgtctcggcgtgtcttttgagttaggatcatttttccagtcaacgccaagagcagtcaggaattctccgaatgatatagcagcttcatctataataaggttaagttctgttttggttagaacctcattgggtccgtgtaatgcgcgcttttttgctaattgcatggatattccatcggcaaatccatgtgtggcaacttccaagtctcctggctccaccgtcggcataggcacctcgttattgtaactagatggttcattatgatccgtttggagaaacgcatatttccatttaacggatcggtatttaacttcttactatctgaatcctaaataaaataatggtgggtatcatgtcctttgcagtcatatttaagaccttttaggtcttaatcaggtaagctgatattggtatccttgttttctggtcccaccacttagttattggtgaaatcatgcattcagtcggatctgtttggccgttttttcggttttttatataaatatttaataattagctttctagggaatagttatagttaaggaaagagtgagctttatttattgttattgtaaatgtattgacgtacagtttgataaatattgattaaataaattaatgaatttggggtatctagatagctaactattttaagatcatcaaatgctattttcttctaaaactaggcagatcttgcctggtgatcggttatttcatgtttactcaaaggaggtttttatgtaattcggcatttataatatgggagatgtcacccctgatctaacctacgggacaataccaactaaagctgaacgtatttagatgatctgaaagaacaaattcaaattaaagaagcgtttagaaagaataggcataagtctgtttagtgaaagattgaggttacatatatatgaagttacgacatttacggtgttttgtagtagtagcagaagaattacattttgctagagctgcggaacgcctgcatatagaacaatcaccgttatcaagaataatcaaaaaattggaagacgatcttggtacgatgttattcgtacgtactacaaggaatacccggctcacacgtgcaggggaaattttactggagcaaactcctcgcatcttttcagtactcggccaggctcgtgatagtgtgaaagcggttgcggccggattccatagtcaacttcgtattgcgttatctgatggcgttacaccatccaaattagctgagctgttagcaaaatgtcgtgaggacgagccggagacggatattcgtttacacgaggtacctttagctcaacatatgaatggattacgtgataacctttttgatgtgggattcgctcaatctacgatagtgcgagatggcatcattgcaataccggcttggtatgattcattggtggcggttattcccgccaggcatccgcttttggcatataaagaattaccgctgaatgaatttttgcgctattcactgattgtctgtggtcaggaaactcacgagggatttctgagacaagttctgtctatattccaaaatgcaaagttagttccatgtatctccgaaaaggttgccagttttgatctcttgttaactttagtggctgccgggtatgggattggtgtggcgggagagtcacagatcaatttggctcggcatggcgacgttgctataagaccatttgctggtggtattcctaaactggtgacgtatatgcttaggcttgactccccgttaacagaagaacttgtacggttcaaagaacgggttggaaatttgtaccacaatgtttattgatcctggtaggggaaaagggctttaaaactctgctaggacttaaaagtgcaattcgcaatcttctaaatttgtagagaattgcgaatttttgacaaatatttggctattcttttccaataatccgatgagcgttttcatgccaaccaaagtaggggacttaagattcctatcttgagaaggaatttgatgatcagcttggtttgataaacgataagtaggtataccctttatctttcaagttgcctctttgttggctgcactcactcaccccggtcacatcgttatctatgctcccggggattcgttcccttgccgtcgcgatccatcttgaaatctatagggtatatgagaagttaaaactggatagttaatttaatgtcgtgtaaaaatctttattgttggtgtatttagataaaaacgctaacgggagtttgttctcccgctggttttataactgtaaataaagtacttactgtataatatttgaaatgttattatttagttattgtttttccttattaagaattttttcatattcctcccaaacgacagataatggtgaacttaaacaacaaatggatattgaacctcctgatggagggtgatattcatatttagatctcccacgatagactcttataggtaaattgttatcagtgggattcttcctttttcttcttaacatcattcataacctcaacgtatattgtttaaattatgcatttagaataaaagtgagatatttatacaatattaacttcataaacatattttttttgtaaaagataacaaatgaaaatattagcagtagataataaaagatccagttttatgttgcatatgagagaagttttttcatattttttacaatattgtttttacatgaaataatattttaatgaaattaaaacatagtgttaatgtaatgtaaagtaaaagttggttttaattatgtgtagttgggttaagcctgttgtttttatcgtctaatgcgatggcgattaatcatgtaactgatatatacccgttatctttcaagttgcctctttgttggctgcactcactcaccccggtcacatagtttgctatgtgaccggggattcctcccttgccgtcgcgatccattttgaaatccagagggtataggtgtgatttgagttaaactgtctttagctgaccatcacggtaaattgtcaaagttaagtcttgcgttttttgatttatctaagacatctgtgctcgtcgtatccggtcttagggaaatttaaagtggtaatattattgtaatgattttggtttgcagtgtacccgattttgcttagaactcagttgctcattcagcaaattttctacaaatgttgttaaaagtttggtctatctggcaggtaatcaaagtactgctcgaacttttataaaaaaggatcttattatctcggctttattgttatttcattttaatccgcttgtggaaatattagacaatcatcttatagagaatagaataatgggaacggttagatatatatttgaatatattcagagaatagataaataggcaaaaatgtattcgttataattaattaaagaagtaggtaacagtcgttaaaaactttttaatgttaatgataacttaacacaaatagttgaggggaaatatcatttgctcttgtgattgaggaagtctacagataaatgtcagatataggttgagatgtttattagttttttgcatattatgttatttattgggatgatatttcctacattgagcatatgtgttggtatttcattgtgatccgataagtgagttttttatctttttgatttctaaagtcttatgtgataaatgtcactatgcgaaattttctaaattaatgaggatttttttgttaaagctgataatctgctcacaaaattaatcacaatatcttatttttgaatttttttcttgatattaatgggttgttgatttaattaacaatcggctcattggtagaacttcttttacttgtgtgggggctaaagtaacgggtttcatatatgtagcttgttgtgaatcactgcttgttgtgaatcactgataggaggcatagctaaaagtgtatgaagtgactggcgggcaatagtcgattgaatgacatatctattaactatcagtcaaaaacagtacaccaaacattcatttaatctgatggataatgtaaaaaggtcagtaaacattacacattaatttcaaacttgtgttacatttatagcgtttttctgaccagtatctctgtgtttcttaatacagcattgcgttacttgttaattataaaggcatattaaacgcaatgaattctgccggatacgattttatggtcagattgggtttactaatttaaggggaaaaatatcttgactaacttgacggaactaattagcttttttaacagtatcctttggggctccgtgttgatttatcttcttcttggggcgggtatttacttcactatacgcacgggttttatacagattcgccattttgggcacatgttttcagtattgaaaaacagtaaaaaatctgacagtgcaggtatttcatcattccaggctctgtgtaccagtttagctgcacgggttggtaccggcaaccttactggtgtggcaatcgccttaacggcgggtgggcctggtgccattttttggatgtgggtggttgctctgattggaatggcaacctcttttattgagagtacacttgcccagctgtacaagacaaaagacgataaggggaattaccgcggtggtccggcctactatatggaaaaggggcttggagtacgctggatgggcgtgatgttctccatatttcttattattgcttttggtctggtatttaatgctgttcaggcaaattctattgttcaggctgctgctttcgcatttgatttcgatcctttgtatgtcggcattggtttggtgattcttagcggattcattatttttggtggcttgcgctctattgctcgggttgcagaattagttgtcccttttatggcgatagcttatctgatcttggcgttctgggtcgtcgggcataactttgaacgaatgccggaagtgtttgcattgattttcaaaagcgcattcggtttgcaggaagccgtttcagggaccgttggttatggtgttgcacaggcgatgacacaaggtgttcaacgcgggttgttttcaaatgaagccgggatggggtcagcgcccaatgctgctgcttctgcttctccatatcctcctcatccagcatctcagggttatgtgcaaatgctaggtgtttttatggatacgctggttatctgtagcgcgactgctgttatcatcctgtcatcgggtgtacttgatggcaatatttcaggaataagtggaatagaattgactcagcgggcattgtcttccgctgttggtgattggggatctgaatttattgcactggctatcttctttttcgcattcacatcaatcattgcgaattatgcttatgctgaaagcaatattgtattccttgaacgtaatcataccgcgggcttgatgatcttacgtctggcggcgttgggtatggtgatgtttggtgcgttggctgaattgcctttagtttggaaaatggctgatttgtctatggcattgatggcaattaccaatctgaccgctatcttgttgctttctggcgtcgcatttaaactcgcaaaagattacaaccaacagagacgtgtcggtaagttaccgacatttgatattaatcagtatcctgaaattcagaaaaaggtcgaagttggtatttgggaagaaacggcaagtcttgccaaatcgaaccaagtggctggccacaagtgaaatgctagaacaaagtacataccctatagatttcaagctgcatcgcgacggcaagggagtgaatcaccgggagcatagagaactatgtgaccgggggtgagcgagtgcagccaacaaagaggcaacttgaaggataacgggtataaattatgggaataaggcatcttcatttgtgctttatgtcaagaacaaaaccgataattttataaaaaaatcatgtaaaacataaattttattttgtattcatttgatttctttgtgttattatattgctattcaattaataggtgggacagggaaatgatgaagaagatcatattggttggcttatttatgctattggcggggtgttccagtctggaagatcggggtgcttataaagttgatagctcttttccttcacaaggtcaaaatgacagagtaaggtttttggtgttccactataccgctgtcgatgataaagattctttacgtatactcactcagggcggtgttagtgctcattatttaatcccatcgttaccgaattatgtgagaggaaagcctgttattctacaactggttcctgaagagaagagggcatggcatgctggtgttagtggatggaatggtcggaaagacttgaatgacacttcgattggcattgaaattgttaataaaggatttacggaaatgctacttgagaaagagtggtatccgtttaatgagcagcagatcgatctattaacgcgtttggcgaaagatattattcaacgttatggcattgaacctattaatgtcgttggtcacagtgatattgcacctttgagaaagtatgatccaggcaaacttttcccttggaagaatttggctgagcaaggtatcggtgcatggcctgaagatgcaaccgttgaaaaatatatggctggcagaaaatggcatgataaggcttctgttgagttaattcagaagacattggctaaatatggctacaccattccacaaacgggtgtacttgatgaagatacccgtaagaccatcagtgcattccagatgcatttcagaccagatgacatcagcggtaaccctgatgcacaaactgaatcaatagctctggctttggttgagaaatataaaaaatagtttttagtatcttatgagatcgtgccatagaaagaactttattggagtgactttatatggcatggtttttctcattagcctatacccgtcatctttcaagttgcctctttgttggctgcattctctcacccggtcacaacgttatccatgctcccggggattcgctcccttgtcgtcgcgattcatcttgaaatccataaggtatattactagtttaagtaatagtcagattgaatgaaatttttgcaatatggcgagaatattactctttattatgattttttcctccaggcagaataaatgcaagaataatcccaattaggctaataagaggtgaatacattattattttttcggaaaaatagtttggtaagacgctgcacagatagataaaaatagagattaaccagccatataaccccacgtcattaaatctgtaagctgttttcatgattaaatagtaaatcgtagcgaaggagcacattgcccataaaccaatagagatcatgtacagccacactgataactcatattgcatatgggcggcataattattttctgctaggtaaccagagagaaagattaatattccgaaaataaccgctattttaataaaactaataatataatcttttctactcaatttttgactgaaatagcttttcattgcactaactggagaatcgtccataaataatggtcaggtaaataaaaatggagcagataataactgatctagtgatggtatgaacagaaaaatatcagtcagatattatatgagaatatttaaaacgtaattttaagataaatatgtataaataaggtgatgattgttaaattatatgatatacccgttatctttcaagttgcctctttgttggctgcactcgttcaccccggtcacatcgttatccatgctcccggggattcgctcccttgccgccgcgatccatcttgaaatccatagggtatagtttgtgttgtttatgatctttttggtgtttaacccattctttgaggacttgacaaatgattattcgcttatctaagactttgatgatttttgcaatagctttgtttgcgacattagcggcttttggcaatattacagactatgcgactaatttcgcatttgtacagcatgtattaatgatggatactattttcccagatacaactattacctatcgtgcaattcattcaccgttgctacaccacattggttatattgtcattatttctttagaaactttaacggcagtgttatgttggattggcggtattcatttactggtaaatttaaaatctaatgctgctgtctttaataaaaagaaatctattgcgatagttggtttgaccttgggattcttgacttggcaagtggcatttatgtcaattggtggagaatggtttgggatgtggatgtccaaacaatgggatggtgtgtctagtgctttccgtttttttatcactatcattctggtattgatttacttaattcagtatgacaaagaacaagaataagaatataccctatggatatcagggatgaaatatcaaaggtactgacatcagggttgtccgtttttcaaattcatgttaacggaaaccaagtgccgttaaaaaattcgacagagctctctgtccatctaatcatgaaacccagagagccttgttaagggaagtatgatgtctggcatcaaataaaaggtcagaacacaaaggttgaagctctttgtctttcgccggaaagcacagttgcattggttgggtaattgcccgtttcaatgttgttctctaggttatcgtgtcatgaacagtgagtagtgaaatgcagcggtaatttaacttcgagctcaatctctggattctgccggaaatcatagggagttatgccatactctttgcggaacatataagtgaaatgagattgagagccaaagccgaaatctaaggcgatatcaaaaataggcaacgcgctgtttcttaaaagatgaacagcgccagccaggcgtcgttggcggatatatttaccaagagaaattccggtgacttccttgaatattttctgcatgtgccaaagcgagtaaccggagtaagttgccagttcttccaggtggattacccggccaaggtgattctcaatccatttgctgagagcacatacaagtgctaagtgattatcctgtggcattaacaattttgttctggttgaaagtggaaggaagtatacacaactttttctaaagatgacaaagccttgacataacgatttaaattgtaactgaatgtgacaattgatttttttgttatagtgaatagaatccacatggttagtgtttgtttaaatgcgttctgattacattgttagcatgcatactgttgctggttcgattttttcacaatgaaagcacaggatgaatatttttcttgtttcattgctgtaaaatatcatttcccaactttattcttaacgtattgcgttctgaccgaacttgaaggaaatagaattggacataaaaaaaaccattgcaatcttagcattacttggaatatgtctgttcttgtacctgctagctttggatagctattgtgatcagggggaacagtttgattcaggtatttgttctgtgactcgatatctgcctttctgattagttgctgatactcatcagccattttcccgtcatataatatatctgtgctaacatatatacccaatggatttcaagatgcatcgcgacggcaagggagtgaatccccgggagcatagataactatgtgaccggggtgaacgagtgcagccaacaaagaggcaacttgaaagatgacgggtatatcttcaatatccaccctttaaagctagtgttttgtttgctttgaataaagcagataaggggaagcggttgttttcccactaataacaagatagaagttgtatcaagaggacaagatggcaggacaatcgcagcgctcaacacttaaacgcggtttaaaaaaccggcatattcaacttattgctttgggggggtcggtcgggactgggttgtttctcggtattgcacaaactataaaaatggcaggtccctccgtaattttaggctacgctatcgcaggctttattgcatttctgattatgcgtcagctaggtgagatggtagtcgaggagcctgtagcggggtcgtttagccattttgcatataaatattggggcgattttcccgggtttttatcaggctggaattattgggcgatgtttactctggtcggaatggctgaactaacggctgtgggcatgtatatccactattggtggcctgatattccaacctgggtttctgcaaccatcttctttgttttaatcaatacggtaaatttaattaatgtccggttatatggtgaaacagaattttggttttccatcattaaagtgaccgcaattatctgtatgattgtttttggctcttacctgttagtcagcggaaatggcgggcctcaggccagcattactaacctttggcagcatggtggctttatgcctaatgggatctccagccttattatggcaatggctgtcatcatgttctcttttggtggattggaactggtgggtattaccgcagcagaagcggaaaatccacgtatcagcattcctaaggccaccaatcaggtggtatacagaatattgattttctatattggttctctgacggtgttattgtcgctttatccgtggggcaatgtcgttgaaggtgaaagcccatttgtgatgatttttcataacctggatagtttctgggtggctaacattctgaatattgttgtcctaacagcggcattgtccgtttataacagcggtgtgtattgcaacagtcggatgctgtacggtttagcaaaacaaggtaatgctcctgaaatgctgacaaaagttaatgaaagtggtgtgcctatcagagccattgtcatgtctgctttagcaacgtccattggcgtattgattaattatgtgatgccgggcaaagcatttgagttattaatggcgttggtggtaacaacgttggtgattaattgggtcatgatctgtatggcgcatttaaaattccgggcagaaaaagttaaacaggggatagcgccgtcatttaaggcattttggtatccgttcggtaattatctgtgtctggttttccttgcttttatacttgtcattattttaatgatggatagcatccgtatttcagtcatcctgatgccattctgggtgggggtgttatggctcgggtttttaatgtcccattctcgccgtgataaaatgaaaacagaggagctgggataatatctataccctatggatttcaagatgcattgcgacggcaagggagcgaatccccgggagcatagataacgatgtgaccggggtgagtgagcgcagccaacaaagaggcaacttgaaggataacgggtataactggattatctctattaaagataccaggctgatatgatatataccctatggatttcaagatggatcgcggcggcaagggagcgaatccccgggagcatagataacgatgtgaccggggtgagtgagtgcagccaacaaagaagcaacttgaaagataacgggtatagcctggtattttttatccgattaccattgccagcgtaaccaagcgaagagtacattaccgttgttatatgtgccgggaatgtacgttccttgaaacgataaccgatcatattctatggagaataacggtaatgggagtggaatagggacataataataatcatgacgagctgtaacgctcagagtgaaaccaattcccattcggaaaccctctaaatcaccgggtatccacatcttctgaaagccatagccaacgatgggttccaaacggttatgagaatccataaaagccattgcataaagggaatgccaatcgttgtcttcgtcgtaacgatatttaccatagccgaaaccccaaggccgctcattatatctatcggttttctctttatcgtaggtatgtctgttatgccaagtaattaccggcagataaagttcattgttgggtgcatcccaagtaagagcgacattattattgaatttttcccataaactgctcgaattgttgccataactgatcggtgtgtgagattcaatggttgttaatgatttgttagcagtatttgctgttgttgcaaatactgtcccagatgagactaaaagcgtggctgatagggtacaggctgcggttaaatcaaacttcattatttattgctccaatttcccgacggcataaattggggagatcctttgtatcacgtaaaatatgacaaacatctaaattcaggaattctactcttgctattttcaataaaagttaaacgaaaaattaatattaagatgtgataggtattaactgggtatataaaatactgatattttagttgactaatatggggaatgtgttgattttttctttcactcaaacagtagagatgggtctctatgaccatactatagatatagaaaatctaataataagacaggcaaaataaattagagttatttatgttatctggggttttgttgagtggataaactgtaagctaattaggataaccttgggttttcaaatttttgcagctatgttaaacaataattgttgttaagaattttaaatatgtgcgttagctccatagctgataaaaaatggcttgccatcatattaagaatatgtgataaatcgttcgggtaaacgaggtatggttctgttatacaactctgttaatagcagcaacttgctctagtttttatgttgcgccgaacggcgaattagaattaagtgatccaaaggaaattcttaaaatggcaaaaatcactggtactgtaaagtggttcaacgaatctaaaggttttggttttattactccagctgatggtagcaaagatgtgtttgtacattttagcgctattcagagcgagggttttaaaactttggccgaaggtcaaaaagttgagtttgaaattcaggacggtcagaaaggtccttcagcagcaaacgttacagcagcataacttctttttgtcaatcattttggattgacgaagtaaatttgttgtctgtttgattttttattggcaacaatgacataccgatatcaccctgttagttatctgatagggtgtttttgttttgacttggggtgcttttcacagagtatggatttcaagatggatcgcgacggcaagggagtgagtccccgggagcataggtaacgatgtggccggggtgagcgagtgcagccaacaaagaggcaacttgaaagataacggatatacttgcttttcttttgctggttggaagggtagctataatgagaatcaattcactgacaattgccggtactgatcctagtggcggtgctggcattcaagccgacctaaaagctttctccgcacttggtgcttatggcacaacagtaatgaccgcgcttgtggcgcaaaacacctgtggtgtgcaatctgtttatgatatcgatcctacttttgttgcggcacagcttgaatctgtgctgtcagatatcagaattgatagcgctaagataggcatgttatccaatgcggccaatgttgttgtcgttgccgatgcaataagccgttatgccgttccttatgttgtattggatacggtaatgattgcgaaaagtggcgatccgttgttggcaccggaagcggtttccgaggttgttgaacgattattaccgaaggtttcgttgattaccccaaatttgccggaagccgccgtgatattgcaatgctctgtagcagaaactgaaacggacatgcaaaaacaagggcgtgaactattatcgctaggatgcgaagccgttttactgaaaggcgggcaccttacagaacatgaaagccctgattggttatttactgctgagggagaatggcgttttactgcgccgagaattaatactcgtcatactcatggtacaggatgtacgctctccgccgcactggctgctctgcgtccgcgttattcgaattggcaaacaaccctgcctgttgccaaatcatacctccaggcggcgttagaacaggcggactcgttagaggtaggaaaaggaatcgggcctgtgcaccattttcatcagtggtggtgagagtagctgattggcgtttttgggatttgatgagaaagtgataatgaattaagaagaataaggtgtttatgctgtgagagtagtatataccctatggatttcaagatggatcgcggcggcaagggagcgaatccccgggagcatagataacgatgtgaccggggtgagtgagtgcagccaacaaagaagcaacttgaaagataacgggtataactcaacattggtagcgacttactatctattcattatcaccggcgacaagtttgatttacgctgacaagcttggtgcttggtttacgcgatagtcacttgcttatccagatagacatcttgaaccgcattaatcagctcaataccctctttcatggattttttgaaagccttacggccgaggattaaccccataccgcctgcgcgtttattaatgacggcggtacgaacggagtcacttaaatcattattaccggatgcaccacctgagttaatcataccggcgcgacccatgtagcagttagctatctgataacggaccagatcgataggatgatcggtagttaaatcagtgtaaacacgtttatcggtatgaccaaagccaatcgccgtatagccgccgttattttcggccattttttgtttaacgatatcggcaccgatagtggctgctaaatggttagcctggcctgtgaggtctgcactggcgtgataatctaccccctctttcttgaaggcagaattacgcaggtaggcccacaatactgttaccatgcccaattcatgcgcccgtttaaaggcggctgaaatttcctcaatttgacgccgtgattcaatagagccaaagtaaattgttgctccaacggcgacagcacccatctcgaatgcttgttcaacactagcatataaagtttgatcatattgagcgggatagctcagtgcttcattgtggttcagtttaaccagaaatgggatcttatgagcataacgacgagaaaccgcggataacacgccataagtagaggcaacacagttacagccggcttcaatagccagttcaacgatattttttggatcgaaatagagtgggtttgctgcaaaagaagcggcagcagaatgttctacaccttgatccaccggcaaaatagacaaataacccgtacctgcaaggcgaccatgatttaacaatgtttgcatggagcgcagaactgtattaggtcggttattgtcgatcattacgcggtcaacaaaatcggcaccgggcagataaagattttcacttagaatggtattacaacgatgttgcaataaactgtccgcatctttgcctaacaacttagcgatatcagtcatgttttactccagttatgaaaagatactatcgattgtcatttatcctttttaggataacaagttatattgggggggaagtggtagtggatcgcttcaggtcggactttaaagagtattttattatctggaaagtggctatttagcgaaaaagtgacattaccattcctttaaggagtatggaggcgaaagcgtaagatctttatgtgctggattatatgttctcatcattcttatcgtttgctaacaaacaattttctaggataagataaataggtgtatgagatttaatactgataaagaataaattattcactgtatttataatatagatattaatttggcattgataaattgaaatatcaatatagttaaatatagttaaatatagttaaatatggttaaactgctcgtctttattgaacttgttaatattttattggcttttattattcaacaattaaatgtttttatcatatatttgagatatgttattgtttctatggaattttttcattgttatttttttgttaatttataccttatggatttcaagatggatcgcgacggcaagggagcgaatccccgggagcatagataacgatgtgaccggggtgagcgagtacagccaacaaagaaacaacttgaaagatgacgggtatatagcattacaatgttgttaggtggaattgataataatactgagtgtttttagagtaaaaactaatatggatttatcattttaataaataactcattgattaatattgaattattttcctggttcaattaaccggataataaagtcagtctttatattttctctttttatagctaaactgattatttattatatggatttttcacaaagacataatgtgtttttctattatttttatgaattttaaaaaattatttttcatatttctttctctctattgatatgaatttaattgattttaattattcatatgaatgattttttattttgtcaatttattgataaccaagttgcggtattatatatgataaataaccatttttgacgtcaatgttttttaatctacataatcctgtaagcaacagtcaatatggttatttattctttcgtaaaaatgataatagtataaaataataattatactaaatttttagttttgccttgtattcatcaattaattaattgattagaaaatatatcaatataatttgatgttatcacagatggaaaatttctcatgtttttattgttaatagtgacatttcggtttcttccatttaccaagagtaatttcttattacatttcttctgtagtaacttgtttgcaaacgatattttataaagttattggatctattgatacagggtgagagcttgatagatgaaggttgaatgcttatcgcggttacttgctagtctgatttttcctgatgttattgttagatggtatttttcatgcttgctccggtgtaaaaatgcgtttttattgtttttaggtttagcttttaggtttagttttttggtttactgagtggctcctattgtgggattaaatttcatctttatggaagggtaacatgtactgcattgttgtttatcagctctggggtggtttggctatttttcccttgctcatattgtgggtatataaaacagaatccattttgggttgttaagtgggtatagtcaggtaaatgttgaactaatagttttaacaataagtaaattgtaattatctgttttcataatcttcacctgattaattctatcaaattgtataatatttggtctaaatatgatggatttcctgaatgattaaacagtggaaaattttaattacatttctttagatagtgtgatatttcaataagtagaaatattttcttattaatatgtagggtatcagaaacacatgaatataaatattcattgatttaatagttaaatttctctatgtaattaatcatgtaaatgaattctgtaacttgttgattttatttcccagagcaaaaaagaaaaggccagctcaagggagattgagccggccaaggaggtggttcctagtcttactgtaaaacttttttaattttttatttttcaccaacaatactacggtaaataaaatagtattgatgtgatctgtttctaaaaaaagaaatatatcatcgtcaggaggggatattgatgattatttgtctgagtttcggttcgtttgaggatattgagaattaataccatttagattacgtattaataaggcgtaattaatatcaatttgtttaggaattggtaaatagacaatatacccatccccaggcgcaacttccattggttggccttttttatcctgcattgtttccagtgtaaactggatattgcctgatggtgtcattaattcgagacggtctccgatcatgaatttattcttgacagccacttcagccaatccgttgactcgctcacccgtaaattcaccaacaaattgttgggtatcggatatcgagtaaccgtattcataagtctgataggcatcatgggtatgacggcgcaaaaatccttcggtatagccgcgatgagcaagtccttctaatgttgttagcagcgttggatcaaaaggtttccctgcaacggcatcatcaatggctcggcggtaaacttgtgctgtgcgagcgcagtaatagaaggattttgttcgtccttcgattttcagagagtgaacgcccattttagttaatcgctcaacatgctcaactgcacgtaagtctttggaattcatgatgtaagtaccatgttcatcttcgaaagctgacatatattcaccagggcgttttgcttcttcgaaggtaaatactttatctgttggtgtgccttttcccaatgttggctcgatattttttgtcggtatcggttcatgcatatgcacaatattaccgatatcatcttctttgccttcttggacatgatattcccaacggcaggcattagtgcaggttccctgattgggatcgcgtttattaatatagccggataataggcaacgaccggaataggccatacacaatgccccatgtacgaaaatttccagttccatatcgggaacctgctggcgaatctcgttaatttcatccagagaaagttcacgggaaagaataacccgcgttagtcccatttgttgccagaattttactgtcgcccagttaaccgcgttagcttgaacggaaagatgaatttccatttcaggaaaagcttcacgaaccatcataatcagcccgggatcagacataatgagggcatcaggtcccatatcaatgacaggctttagatcacggataaaagttttcaatttggcattgtgaggagcaatattgaccacgacgtaaaagcgtttaccaagctcatgagcctctttaatgccgagtgccagattttcgtgattaaattcattattgcgaacacgcaggctgtaacgtggttgaccagcatatacggcatctgcgccataggcaaaagcatagcgcatattttttagcgaaccggcaggggaaagtaattctggagtaaacatggttaaaaaattctcggtttgagttgagatgagttttcactataaaaagtaaggataaggccggggattctaacgcgtattttgttgcggatacaaatttattagtatgaaacgttcggttctcttgatcgatggagagcgccttatcaattgacgatgactttcaactgataaggtgcggtttatcatgaaaaaatattattctgactttgttagatctcgaacattgacgctagagccatgtttaatcgcagattgaatgccttttttgaccgcgacttcattatcgtaagactcgctgatgccgataacttgatagtttctcgctttcagcacgaaataggacttgccagatttgttttctctgatttcgaagtttttttctgccggtgaatttgcttggacagaacgaattcctttattcgctgctgccttggtcgtatacatttcactggtaaggataacttcaccgttcgatgcttttaaattgaagtaatactgcttgttttttgttctcttaagatcataatgacccacagccataagaaattcctccaattacaggtaagtatttttaatatagctgaatttctgaccggtgaaaggttgagagaaatttaattcagttaaagtgtgacagttataacaaacggcatatatctgcttcccatcggtaaccaagtccataaatagaacgaatgaatgttttactgttatccaattgttccagtttacggcgtaaatttttaatgtggctatcaatggtacggtctgtcacgattcggtgatcatcatataggttattcaataacttatcgcgggaaaatacttgcccagggcgacttgccatcgtttttaataaccggaattcaaccggggtcaaatccagtattttatcgcggtaacgcgcctggaaacaggcttcatcaatgtgtaaatcgctttgtttgacaatatcttgtggtcggtaacagcgacgaagaatcgttttaactcgcgcgacaatttcacgtgggctgtaaggtttacaaatataatcatctgccccgatttccaatccaagtaaacggtcaatttcttccgttttggcggtgaccataataatcggtacatcagagaagcggcgaatttcccgacaaatagtgatgccatcacagcctggaagcatcaaatccagcaaaataatatctggattatgttgctgtacatgggagacagcttcatcacctcgcagtagccactgggtttcgtaatcagccgcctgcaagtaatcaaccagcaattgcccaagttttggctcatcttcaacaatcaaaacagtataatgctcaaattctgtactcataacgtttcgccgtcgagggattcagtgagcgacaattctacgataattctcaggccacctaaaggtgagggttcggcatggatcgtaccgttatgggcttcaacgatgttatagcaaatggctaaaccaagtcctgagccaccactggcgcggtttcgtgaggattcactgcggtagaatcgttcaaaaacccgttggcattgctctggtgacaaaccgggcttgctgtcctcccaattcagaatgaagtggttatcgtcagaacaacctttaatgatcaattttccattatcagcggtatagcgaagactattttccagtaaattatgaaatagctgagtcaatctgcttgggtcagcaaacaacgtaatcatttcaggaagtttaacatccacttggatttgtttatcaaggaaacggccatgataagatgcgatagcaacctgaattaactcactgatgttgataaattctttccggtatgccagcgccccgcgatcggatagagatagttgatgtaaatcatcaaccagtttggtcaatgtggtaatttcagccaataacgaattgagagtttctggcgttggtttgtgaacaccatcctgtaacgcttccaattcaccacgcaatatggaaaggggagtgcgcagttcatgagaaatatcggccatataatcgcgacgcatctgctcgtttttttccagggtactggcgagttggttaaaattgtgggcaagctgaccaatttcatctttacttgatggtgtgactcggacactaaaatcaccggctgccagtttatgtgttccttcaaccaaacgtttaacgggttttaacataccgcgggataataatagcgtggctatcattgccagcaaggtagataaaccggcaattatccagcttgtcagttgttgctggcgatcaaaactgatatcagcttgacgggtaattttatctgatgtgctaacaatgacccaaccaacgacttgatgatgatagataatcggtttgcgataagtctctgacgggattttaccttcatgaccgaccagcagtttcatgtcactgtccaccacccaaaattgagttcgccaaccgcgaggtggtggaccttgacggctttcactggtttgttcaatggagcggatgatttgaaaaattgcccggtcattcctctttaagaatttccagttgccatgttgttgatattgttcagccagtgcttcggctaacatggcagtacgtagctggatattttgttttatataaccaataaaaccatgctggaagctgcttcttacgccccagtgcatggtgatgagtactagcatgcaagtggcgaaaatggccataaacagtttaccactgatgccgagtttcatgatggctccataatttgcttggtagtacgccgttgttgccacttttcccttactgcctattccaatagggctattttatttgccattttgaacctgggcagtgctcaaaatcctcacgtactacgtgtacgttccggtttttccgcgctgtccgtgttcaaactgcctgcaacaattacgcctattgggataggctcttagtcgatcaaaacagagatagacaaccggtgtggtatatagtgttaaaagctggctcataaccaaaccacccacaatggtgattcctaaaggttggcgtaattccgtaccgtcgccactactcaaaaccagtggcagggaaccaaacaaggcggccagtgtggtcatcagaatcggacggaaacgtaataggctggcttggaatatcgcatcacgggcgcagatattaccgttacgttgagcttcaatcgcaaagtccaccataataatggcattctttttcacgataccaatcaataacatgatgccgattaatgctatcaggctgaatggtgtgtcaaacagttctaatgccagcagggcaccaataccggcggaaggcagggtagagagaatagtcaatggatggatataactttcatacagtatccctagcaccagatagacggtaataatggccgccagaatcaagaataattgtgatttcagggtttcctgaaaaatctgggcggtgcctgcaaaagtgccacgaaccgttgaaggtaccctaagttcggttgtggttctttcaatcgcattgatagcatcagagagggtatagccttcgggtacattgaaagcaatggttgaagcagcagaaagcccttgatgattgacacttagcggcgcgttagccggttgccagtgagcaaaataggagagcggaatggcttttccttgattattaatcacaaacattttttccagtgcgctgacatcctgtgtatattctggtgcaacttccatcaccaccttgtactgattaagtggttgataaatggtggatatttgtcgctgaccaaaagcattattcagcaaattattggcttcactgacattaatgcccagacgagacatggtatcgcggtcatagattattgccatttcagcgcctttatcctccttatctgaattcacgtcagtcagttgcggcaattgccctaatgctttacggataacaggctcccatttgcgaagatcattcagatcatctgccagcaatgtgaattgatagctggcattagcctggcgaccgccagccctgatatcttgtaccggaatgagaaatagatttgctcccggttcattggcaagtttaattctcaggcgcgagataatctgttcagcgttttctgaacgctctttcaatggctttagagagataaacataaagccattatttacccgcccaccaccggtaaaaccgataacgctgtctaccgtaggatctgcattgattgtctgcatgaagtttttcattttttcacgcatagactggaaagagatactttgatctgcccgaacaaaccctagtaaccgaccggtatcctgctctgggaagaaagttttggggatattgatatagagccaaacatttagggcaatgatgccggccaaaattaacaatacccaacggctatgattaagaacccacatcagggagcgcccgtaaacttgctgaattttcagtagaactttaccgaatcctcgtattttcttctgtgctttgggacgctgagattttagtaaatgagcgcacatcattggcgttagtgttagagaaaccaataatgagatgctgattgatgtggttagggtaatggcaaattcacggaacagccgaccaaccaatccatccatgagcagaagcgggataaagacggctaccagtgaaatactcattgagaggaccgtaaaacccacttcccggacaccctgtagggccgcttgcatgggttttatgccggcttcaaggtggcgggaaatattctccagtaccacaatcgcatcatctaccacaaatcctgtggcaaccgtcagcgccattaaggaaagattgttcaaactgaaaccgcacagatacatagcggtaaaggtgccaatgagtgaaaccggtacagcaatggcagggatcaatgttgcgcgaccagaacgcaagaacaggaataccaccagaatgaccagcccgatagcaatcaccaatgctcgttctacttccactattgaagcacgaatagtgggtgtgcggtcttgagcaactttaagttgaatactggcaggaatagattcatgtaatgcaggtaattgttcacggatacggtttactgtggcgataatattcgcgccagcctcacggcgaatgatcaacaaaatagccggctcaccgccagacattccggctgctctgacattctgaacagaatcttttacatttgctacatcctgcaatcgcaccggtgaattgttgttgtagtgaacgatgatcgggcgatagttttcggctgtttttaactcatcattcatttgaatttgccagtgttgctgctcggaatccacatatccttgtgggcggcgaacattggcattgctgatagctttgcgtaccgcatctagcgaaaccccctgatgaaacaggacgccaggattcaattcaactctgactgccggtaatgaactgccgccaacagagacttcactgacgccttcaacttgggcgattttctgagccagttgagtagaggcaaaatcataaagctgcccctgattataggtatcggaagtcaatgtgaggatcatgattggggcatcagtcgggttgactttgtaataatgcggccggctaggcatacctgaaggcaacagactttgagcggcattcagcgctgcctgtacatcccgtgctgcactgttaatatcacgattgagatcaaattcgagcgtgatattggtactaccaagggagctactggaggtcatttcattgactccggcaattcggcctagggcgtgctccaatggcgtcgcgacagatgaggccattgtttccggtgaagcgcccggtaatgaggcgtaaaccgagatcaccggaaaatccacttgtggtaaaggagaaaccggcaacagggtaaatcccaataccccacatagggttatggctaaactcaatagcgtggtggcaacagggcgttggataaataaggcaaaaaatttcaccgcggctcctgatgatcaatagatggcgtgtttgaaactgagagctggcgattgcggcgatagtgggccagacgatcaaacagcaaatagatcactggcgtagtaaacagtgtcaggatctggctcataatcaatccacctaccatacagatacccaaaggacgacgtaattcagcaccgacaccggtgctgagcatcaaggggagtgccccaagcaacgccgccattgtggtcatcagaatcggacggaagcgcaataagcacgcttgataaatggcttcgtaaggcgatagtccctgttcacgctccgctgccaacgcaaaatcgatcatcatgatggcgtttttcttcacaatacctatcaacaagataatgccgatgatcgcaatgacatccagttcatgacctgccatcatcagcgctaatagtgcacctactcctgctgttggcaatgtggagagaatggtcaccggatggatgaagctttcatacagtatgcctagcacgatatacatggcgataatggcagccgcgattagccacaatgtattacccagtgcgctttcaaatgccagtgttgttccttggaattgggtggaaatgtctttgggcatgttgatcaattgcgcggcatcacgaacagcattgaccgcctgttcgagagaagcatcctcggcaacgttgaaagaaaatgttgctgagggaaattgagctaggtgattgattgccagtgggccaaatttttgttcaatagttgcaatagttctgagaggtacgacatggccatcagttccgttaaggcggatgttatcaaatgctgccagccccggagtcgatgttacatcatgttccaagatgatccgatactgattagcttgcgtataaatggttgaaattagccgctggccgaatgcgttatagagtgcgttatctatagcagccattgagatgcccaatcggctggcaatgtctcggtctactttaacgtaggcgatcagcccctgatcttgccagtcactgctgatatcaactagctctgctctctgctttagttcagccagcaattttggcacccagatactcagttcatccagagaggttgcctgcaaagtgaattggtattgggtacgggtaacctgagtgtcaatcgtcaaatcctgcatcggttgcagatagagctttatgccgggtatagcggcaactttttcctgcaaacgcggaataatgtcaacgattctgtcatcacgctgattgagtggttttagtgtgatttgcagtcgcccgttattcaatgttgggttactgccatcaacgcccacaaaagtggtgatattttctactgccgggtcttgcagcaataaggatgaaacctgttgttgtttattcaccattgcggtgaaggaaatggattgtggcgcttccagtgttccctgaatcagcccattatcctgtgatggaaaaaatccttttggaatcatcagatagagcagggcagttagcgccaatgtacttagggcgatgccaaaggtgatccacgggtgattcagtgctctttttagccatacagcataaccggcaatcatttgttcaaaaaatcgtccactggcttgttcaaaacgattgtgttttatctgtgattccggtttcaggattcgagcgcacatcatgggggttaatgtcagtgagacaacggctgaaatcagaattgccacggccagggtaattgcaaactcacgaaacaggcggccaacgatatcgcccataaaaagcagcgggatcagcaccgcaatcaaagagaaagtcagggagataatggtaaaaccgatttcacccgcgcctttcaatgcggctgtcatcggtttctcgccttgttctatataacgagagatattttcaatgaccacaatggcatcgtctacgacaaaaccggtagcaatggtgagcgccattagcgtcagattattgacggagaaaccgcagaaatacatcactgcgaatgtgccgatcagtgaaaggggaacggcgatactggggataagtgttgcgataccgttacgtaaaaacagataaatcaccataacaaccagtgcaattgccagtaatagctcaaactgaacatctttcactgaggcgcgaatggttgttgtgcggtcagtcaggattttcatatcgacggattttggcaagctgctgatgagttccggcaacatctggcgaatgttatctgtagtttcaatcacattggcacctggctggcgctgaacattaatcacaatcgcttgtgtgttattggaccatgcacctagtttggtattttcagcgccttgttcaatggttgcgacatcttgtaaccgtaccggtgagccatttttataggcgatgatcaagttgcggtaatcatttactgacttcatttgatcgttggccgaaagcgtgacagagcgagtcggaccatcaaggctacctttggcggaattaacgttagcattgttgatagcggtgcggatggtttcgctatccaatccctgtgcagcgaccgcttgggcatttagcttcactctgacggctggtcgctggccgccggcgagtgtcaccaatcctacaccgttgacctgtgaaattttctgcgcaatacgggtttccaccatatcttgaatctgtgtcattggcattgcatcggaggtgactgctagcattagaatcggtggatcagcgggattaactttgctgtagatagggggataaggcaggtcattcggcaataaattactggctgcattgatagccgcctgcacttcctgctcggcgacatctaacggcaaagttagctggaattgtaatgtgataacagaagccccgccggaactttgagaggccatctgtttaaggccagacatctgtccgagttggcgctcaagtggtgcggtgactgccgaagtcatcacatcggggcttgcaccggggtagagtgtgacaacctgaatggtgggatagtccacttccggtaatgcagacacgggcaacatgcgatagccgataatacctgctagcaggattgctgccataaacagagtggtggcaacaggtcgtaagatgaacaggcgtgatggtccgccacctgggattggggagcctgcctgcatcaggaattctccgtttgatcgtgtttttgtggttgaggcttatttaccatcggtgtgacaatatccactttagcgccatctgtcaggcgatcgataccatcagtgaccactttatcacctgctgctaagccggcactgataacaacacgttttgtatcctgcaatttgaccgtgaccagatgtttgctgactttattctctttacctaacatccagacaaaattcccttcattacccatttgcagggcagcatttgggatcaccactgcattttccagtgtatcgactttaatacggacattaacaaactgatttgggaataagatgctttcttgattggaaaaacgggcttttagcttaattgtgccggtagtggcatcaatttgattatcaatgctcaacagcttgcctgcggcaagttgttgctgattattgcgatcccaggcactaacaacgacgtcatgattcgttttctgagcttgtaaaacagcattgatatcgttttcagggagtgaaaacagcacatctaccggatcggtttgggtaataaccacgatagaggagctgttaccactggaaataaaatttcctacatcgatctgtttcaagcccactttaccggaaatgggagctgtaatacggctgtaagtgagttgaagttttgcactatcaattgcggcttgatcaactttcagactggcttcgtgttggcggacaagtgcacgttgattatccatttcttgttgggaaatcaggtgagtgtttgccaatttctggtagcgattgagatcctgacgagcattcgccaatattgcttcatctttagcaagctggcctttggcttgcgctagttgaacctgaaaagggcgtggatcaatttctgccagtaaatccccttgtttaatttgttggccttcttgaaagtgcaaagcgataagctgaccttcaacccggctggttaccgtggcggtattggcggcttgaatggtgccaagcccggccagaaagcgagggactgcctgctcttttgctgtggcaacctgtacagggggtaaaggggaatgtcttaaaccagaggattgatccgatgggctcgattgttgaggggttttaagttggtaccagaaaaatatagcggcagcaatggcaatagcggccagtgctgcacggaaaaggagggtacggtgtttattattttgattcatttcttcgacattctctcaaacgcaaggctaagatgttgcttgattatgtccgactgaaatatcggtttaatctcatgctattagtttagacagtgaggataggctaaaaaatggagaaaatgtggaaaatatgtcaaggaagcgctttttaaggcaaattaaggcgttttttgtcagttttttcgagtcggctccagaaattatgcaaatgaggctgcttctgttaccttcgttttctttacggttgtgagattatatcgcttaattttcaagagaatttaaacgggtgataaaatgcaaaaaaatatagtccatagtgtatagaacatattcctgcgaattgtttattgatggtaaattgtgaaatagatcacatattggttatctatctctgcgcacattgtttcttaattctggaaaaaggtcatgtgacttttttttggcggaatttatagattaatgtaaggaatatgataaagggaaataggctatgagacatttcattattgatacagatacggcttccgatgatgcagttgcattatttatggcgctccgtgaaccctcagtttttattgaaggtattactattgttgctggtaattgtgctgttgcgcagtgcaggaaaaatgcattagttagtattgaaaaagcagggacatatattcctccggtatatgaagggatgagtaaaccattatttagagagcattatgcttcatatcatattcatggaaaagatggtatgggtaatatgaatttaccagagtcttcgttaatagtagaagataaacatgcagtagatgccattattgatatcgtgaaaaaatttcctggtgagatagagataatcactttgggaccattgacaaatatagcaatggctgtcttaaaagagccaaatttatataaatctgtcaaagtgatatatattatgggtggctctgggttgaagtcaggtaatattacgccattggctgaattcaatctctattctgatgctgaagcagcacatatagtattgaattctggattacctcttatattttgtggatgggagttaggtatggaggaggcttttattaatgaattcgatatggataaattaaattctttaggtgatcttggtcagtttgcagtgagctgtaatagaacattgattgaattcaatgcgggaagaacgaatagaaaaggatttgatctgcctgatcctataacaatggctattgctttatatccgaatgaaatgatagaggataaattagcggtgtatggttatgttgaatatcaaagcgcacgttcatatgggcatttagtgattgattcaaccgatcttctcaatcatccccataatatgagtgtggtgactaaaatcaagggtgaggtatttaagaataaactatttacattattatcgtaattttagtcatataggagaataaaagatgaattttaatcctgatttactgagaaaggtagaattacatacacatcttgattgtgggttgagttatcatttcgttaaaaaattcattcctgatattacccgtaagtcattttgtgaaaaatatattgccgctgaaaaatgtcatgatttaggtgattttttaaataagatcattccttcactggatttactacaaaaaagggacgtaatcgctgatgctgtagaagatcttttcatacaattaaaaagcgataatgtagtttatgctgaaattagatttgcacctttacttcatcttcgcttaggattaaatgaacgcgatattgtagaaattgttttggaagcaatgaaaaattattcaatcaaatatggtatagcagcaggtttaatattatgtacattgcggaatttttcagaagatcaaagtttgagaaccgcatatcttgtcaatgaatattctaattacggcgttgttgctctcgatcttgctgccgatgaggcaagatatccacttagtgcacatttgaatgcgtttagaatggtgttggaaaatggtggaaatattattgcgcatgcaggagaagcgaaaggggctgaaagtgtgcgcgagactattaataaattaaatatttctcgtataggtcatggtgttagaagtattgaagatcgagatgttattgaactccttatagagagaaatatacatttagaagtatgcccgacgtgtaatattatttgtgatatttatgatatttatgatatttatgatatctatgaaaatcatccagttaattttttaaaagaggttggtgtaaatattgggattaatacggatgcccggacagttgcaaatatcaccttatgtgaagaatatctgaggattaatcgatattttggttggcaatatagtgattttattgaaacaaatttgaatgcattacatgcttcattttccagtaatgaactgaaaagtcgattggaaaaggaaataatgagattatcgtagtgaaaaattgcattttattcatctttatgtataatcgtaaaaaatttatattaaatctgtaatctgtaatctgtaatctgtaatctgtaatctgtaatctgtaatctgtaatctgtaatctgtaatctgtaatctgtaatctgtaatctgtaatctgtaatctgtaatctgtaatctgtaatctgtaatctgtaatctgtaatctgtaatctgtaatctgtaatctgtaatctgtaatctgtaatctgtaatctgtaatctgtaatctgtaatctgtaatctgtaatctgtaatctgtaatctgtaaaaagagaataaattgaaagattatattgataaatatcatcttgatagtatttttccagcagaatttatgccaaagttagatgtggttgaaattaagaaaaatacctatcttacacatcagtcatcaatttttactcatctctatattttagttgagggtaaactaaaggttgagttttataatgttaatggaaaattttctgtttttgcctttgctacgcctctttttcttattggagatttagaactttttcatgcccaaggcgataacataattaatactgtctttgctcaggagcgatcagttctgctatcaattccgttagaaacggtaagaatatttggattaacagatgttggatttcttcaatttgtttgtaagcaactcagtaataagctttttgagtcttctttgtttcgaacggggatatttttaactgttgaggataagctaaagcgatttctttactatcattcgaaaagaaatggaactgtgttggtattagagaaaagggaagatttagcatctgttttaggtgtttcagtcaggcaattaaatagagctattaagagtttgaatgaaaaaggaataattgtatcgaagaataagagagttgacattattgattatgatttcttaaaaaaggatattgagtttcaatttgacgctaagtgatgaaaataaaaaatcctatttttatcgctaaatagctgcattgttaacagaatataccctatggatttcgagatgcttcgcggcggcaaaggagcgaatccccgggcgcatagagaactatgtgaccggggtgagagagtgcagccaacaaagaggcaacttgaaagatgacgggtataatggttaaattacgatatgaaattaaagtaacccgattctgaaaaatctttgccagattctttaaaacgttctttcggtagtggataacccaaagagagatacttttcagcgaaatataatgaactttgatgggttaatccgatagaattaaggctgtcaaccatgtttctcggtagattgcatttaatatctttaacgtaatcaatgatagtattttttacaccactgccatctggcattcttatttttggtctgtcaatgatatattcgggtatttttcctctgaatgcttcgcgtaaaatatatttttctatcccattattgagtttgtaagaaaaatccaagcttaaaacataaggcactagtgctgaatccataaagggaactcttgcttcaacagtatttctcatgcttgcccgatcaactctttgtaaatcagtcctatgaagattatttaatcgatatagggagaggtgatggggatcggggtatgttttaaatagatcgtaaccagcaaaaatttcatcactaccttctccacataaagcaattttaaagccaagacggttagcaatataatagccaaagtgagcaatagttgaatcaatcgcatcgatttgttcgaaaaattcaccataatagatagcatcttggatattattgattaattcttcctgagtaaatgtatatataatatgctttatattattctcagtacaatatcgttgggcaatttcaatgtcttttgaacccggtaatccaaatgaaatcgccgtaatatcgtggtgatatttttttgcaagataaagcacgatagtactgtctatgccgccgctaaacataattgacactggcaggtctgtgtcaacccgctttctgacggcattatctaacagtgaatagattttttcttttgcctgttcgacgttatcgctgcttgctgggatagttgtgtcgtagctaatatatttctcactagtcaatccgtcgaaaattgaaccgggttcaacaggtttaatttctgagttaaattcgattaatgattttatttctgaggctacataccagttaccctctttttgggtgtaatagagcggttttataccgacgtgatctctgcctaataagaatttattattcttattatcaaatagaataaaactaaacatgccatctaattttttaataaatgacttgccatagcaaatgtaggcaattagggcaacttctgcatcgcccccatttttaaattgataaccttgtttaattaattcatttcgaagagacttgtaattataaatttgaccattcagaacaagatgaagatcatgttcctgatttgatatgggttgataggctgaatcgcgttcgacaatagcaagtctgttggttgcaattgaaaagttatttctgacaaccttctcattaaatcgagatggatcgccacgatgtgctatttttgacattatagtctgtagcttattttcaatatcatcaataagcctattttctgtattaaaaacaccaccaattccacacataggtaattcctttggttaagagctatcaatgatatttaaacgtcttctagtataggggcagaatattttaattcgttcacattggcacctaatgtagatatttcggcaaaatattctggataggtttgaccaacatgatatggctcactgataatcaggggctcatcacaatgtaaacctattgttgtaagtgccatgattaatccatgatcgtaatgaccatcaacaataacaccgcctttatatccatatggattgccataaataattaattggtctagtctctcttctgatctaattcctattttgtctaattcccgccgaaaatcagaaattctgtctgattctttatagcggatatgttcaatgttatagaaaacgcttttaccgttggcaaacgcagctaatgcagccagtgcaggcaccgcatctggtgccagtgaaccatcgaaatcttgcgcttttagggtgccgccagatcgaatattgagacaatcatccctgatgaagctgattttcgttccactgttaattaaatagttcaccaccgcgccattacctaattcttcctcaaagaaaccgtttagggtgacatcagaattcagtgaggcgcaaagtgcaaggattgccgccgtgctggctggatcagcgccgacgctaaattctgatggaataaatcgactctttcctgtcgtaaagaaattgcggaatttatcatcatattcgatattaatgcccgctttgcgtaaattattaattgtcgtgtgaaccattgatggtgcggtaattgtatcgatgacttttatttgcagatctcgttcgctaatggcacctaagtaaagtagcccacttaggaattgagagctctttctgcatgaaatttcagtgtaattaccgatgtttttatctgatttcatgcttatcggtaaaagtgaatcaggcccaactgcggtgcactgaatattgagtgattttagtgcattgaccatttccaattgtgatcgtgtacccagggagtaactgtattctgtaataaattcagtatccggtaaataaccggctactcccattaatagccgtaatacaacgccagaattacctgggttaaagatgatttttttatcaatttgtctgatatctatgccttctacgattgtccctgtaatatcactattaaatgatgcccctaaacgggaacagtttaatttcattgctgttgtattgttccctgatgccatgttatttattttacttgtaccttccgttaatgatgcagtcagaatggcgcgagttgaagaacttttggaggcaggtaaagttattgagccatttaatgatttggttttgtttatttcgataaatggcggatgattattaccataataattcatatttttttctcgcttttatactgttagctaacttattctagcgccgagagagtttaaggattggataaatccaggaaaaccatcatctaatttatgtatatgattaactgttgttcgttcttttgcccctagtgatgcaataatattggatgcgcaaatccgatgatcatagtaactgaatatttcgatgcctccatttaatggtccgttactgttgatccttattttgttgaaagccccagtatcattaaaaattaaataactttttccgcccatcatgcgtatattttcgttgataataaatgcgcgttgacatttatgattatttatagcattaagaccggaaaatgtgatatcgccattgccattaatcgctgccgcgataatgttagtggcaacggaaggaagttcatgtaaatagatttcatcggtaatggtgttatgctccttttccaggctgatattaagttcattcttaattgggttatagtttaaattcataccaaattttttatatatgtcaaataatactctttcgttaatggtattaccaaaataataacttctgatagtgattttgcttggtcgattaatacttaatattgacgaagcaatatagcttagtgatgtgaaatcagaagggatgttaatagtaatatcccttggttgatattcagttgaaataaatgtgctacctgttcgagagattttactccccaataatgccatcatggtaattgttatatcgacatatccattcttagtttcaccgttgttgttaatgataatacttttccctttcataaatggtgaaacaagaagagagaatgataggaattgagtactcttattgaagtttaatggtgattgtgatggatatattcttctggaaataatgacaatattttcttttcgcttttctgcaaatacattcaggtatgaaaaaaatgattcatcatacagactttctctgttaaacagtgaatcattgcattttatataaacttccttttctgttagtgatgctaaagcgacactgattctaaataacatgccagaaccgttagcattaatgatcccattacaatgatatattggatgtgcccctttcaatatgatgtggttttcacttctatccagaatttgcagaccaaattgttgtaaagcaataaggagatcttcggtttcagtacaccacgatatattatttacggttgttgtttcttgattcaatagtgctaatagtagcgctctttggatatgaggcttagatgatggtatgactatttccccgttaagagtggaaccggggagcacgctaattttattcatgccaagcctccaggtagatcaattaccattggtattattctttaatttaactatttactatcgatagcaatagttgtaatttcaacgtaatgttctggctttaccattgatttaacggcaatagtcgtattgaccgggcgtatatcgccaaatttctcattaaaggctcgacaataatcatcaaaatgttggaaatctgttaaatgtgttactgtgctgacaacatcagtcagttctgcatcaagctcttttaaatatttctcaattttttctatgataaatagagtttgctcgtaagcattttcccccataacatttccatcaccatccgaagcgacacatcctgcaataaagatctgattaccaactcttttccctcttgagtatcccattttattttcccacggagaggggctaaatactgtttttttaatttcatgagatggcataaatactcctataaatgaaaatatatatacctgttatctttcaagttgcctctttgttggctgcactcactcaccccggtcacatagttctctatgctcccggggattggttcccttgccgtcgcgatgcatctcgaaatccatagggtataagaagattttggaacaataaattaatttaaacagtttattccgttaactaaaaaatatccgtaaatcaatgtagtattaataaaagtatataaagcctgatatgtcaaataaaattgattattaaaatagaataattggttgtttttttattttaaaaatgaataaatattttttcttggcggaaaaattatttttatgaaaaaattcctgtgattatttaattggttatgtattaaagcgctgagtctggttgtattctgacggtttttttatttgaaagtcatcttagttggaactatacatgatgattaggttgtcttaattttaatgaaattttttattattaagtaaagttagataatttcaggaatgaagaaagcatcataaattaataaatatcaactaacgatggggtagatatgagtgtttttatttttattgaagcaagaccggttgaatgctcggcaattgattatattagagatttggggttttctcccgtgttattgacttcaatggaatcaatgaataaaggattatatgatgatttaagaaaggaattatttgataatatttattatgttgatacgagaaatagtaccgatattattaatttaattaaagatacccgtattcctgttgctgcaatcctaggttgctatgatgattttatgattgtggcgtctgaagtagcattagaattcggtttacctcacccggatataaatggtttgaggaatgcatttagtaagaagaatgtcagggatattctggcacaacatggttatgagcaacctgcttacgcggttttttcttataataatattccagaaaatcctaaggttccttttccgtttgtgattaagccacttcgtgatgcgggggcttatggggtatcactttgtaaatctcaagatgattaccaccatgtgctttcagaaatttcatctcatggcacaatgtcaatgctcggtaaagtcaatgaagagttcttgatagaagagttcttgcagggaaatttttatggggcagaattaatttatagtcatgatgaatggcatttaattggtatcaatagaattttcgtttctcctgacgatgacctgtgtatgatcggtttatctcatcctgctgaactgcctgagtttgagtttgcaatggcttgtaagcttgttaaggagtggctagctgctttgggattacggggtggtgcaataaatgtagaatttatttatacctctcgtgggccaatattagttgaaatcaatttgcgcatagcaggtgccagagcggctcaacagatattcatgacctctgggattaatatggtcaaatacttggtcgattttgtttgtggtatcgaaagttctatatcaccagcgtcggaaatagtttatccatttgtcgctgatgcatttgttttttatcgtggtgagggggttgtcaatgatatcagaatagatgctgatatcccttatttcatctccgcagggtttaagaaaacgccttttgctatttcattaaaaagtaaaagttcatcgaaaaataaaaactttggttctattgtcggttatgttctggcttatggtgatagctgtgaggaagcgatggaaaatgcgacacgtattgctaatagcgttcagttaataacgaattaatgagagattatcactatggcgattctgatggggttgatttcagcattatgttggggaagtacggattttttggcagggcaagtcgcaagaaaagtcggcgttgctaaatctttattctatagtcagctatttggtttttttgttttatcgttgttgctgtttttttattttgagatgtcgtttgttaatgcaagcttttttcaattgaccctctgtgttgttgcttcggtttgtaatttaatggcaatggtgtttctgcttaaagcattatcaatcggtaaagcttcgattgtcgcgccgattgtttcgctttatggtgcggttaccacgattttgtcactgataaatgggaaaccaatgaccgttttggttttgtttagtctatttatttgtgttattggtgcctgtctaaccagtatgccgaaatcaaaagatggacaacgagaatcatctggttcaattttctttgcacttttgtcttcactgatgtttgggttaggtttctggctgcaaggggaatttgctgttagagatctgggggttatcaatgcattatgggtttactatttaaccgctgtggtggttttatttctcacgctattaaaaaaaggaaatttatcattaccgccgatttcaattattgctctggttttttcaattagtttctttagtctgattgggtttgcttcattagcttacggttctgctacgggacatgttgccgttgttaccgttctgagttcattggcaagtggcgtcaccgcgttattaggtttttttattcgtggagagcggttgagccgcattcagtggatgggtattgtgataattatagccggtgtcattcttttgaaattatgacatttatacccgtcatctttcaagttgcttctttgttggctgcactcactcaccccggtcacatagttatctatgctcccggggattcgctcccttgccgccgcgatgcatcttgaaatccatagggtatataatagcttgtttccccgaagaattcgggggaacagtgaggtaatgacattgattaatgataatctgcattaagttgattatttcatttgatgattttcacctttctctattatgacctttttattttgctgatgatgctctaatgccgctatggatgagtaaatgaaacggctaaataaaatcagaaaatggtttggtatctttatattgattcctcggctatttctaattgccaacccgtaacgttatgccagtaaccttgctctttttccagatcaagctgcatcagggtgtttgctgataaatagttgtaaggcaggtagagcgcccaatgactatcatcagtaactagtctgagtgattcagggatggttgtggattggcgttgattattgagtaaagttgccagacgtaggatttgaattaatggcagatactgttttttcttgaataaattgaatcttggcaaatcatccagttttatggttttacgatgacagcgaactaaggttgccagcagtaattgctgttcctgattaaagccgggtaagttggtgttttgcagaatataggcagagtgtcgctgtaatccgcttaagttaatacttaatccaacttcgtgtaacattgccgcccagtgtaaaatcgcttcgagttgtggttgcactagtttagggttctggattgcccactgttggtaaagtgtttcagtcgtattaagtacacgctttgcctgttctcggtcgatattatagtgctcagccaggcttcttgcggttctctggcggatatcttgatgacggaaacggccttccatttcatataaaacgccttcacgtagcgcaccatctgagagttgtaatgcttttatatgcagggtatcgaatataccgcataagatagccaaaccaggaataaaaaagtgtttacgatcatccgctagtccgggtaagtcgagggtttttaatttcttgaatttgagtatttctttgaccaacatctccagccgttcaggggtgattaatccgtccttttcccccatggcgaccagcacttcatacaccgctttaatggtcccggatgccccaagcgctgaattccagccagtgatgcggtactgccatgagagattttccagtttttgtgcagcttcaagccgcgctcggcggaatttttctgcgctaatttcgtcatcaggaaagaattggtgggcgaaactaatgcatcccattcggcggctttctaccaataatggttcaaaattttcaccaatgaccagttcagtggagccgccgccaatatcaatcaccagtttacggtttttttctggttgtgtatgttctacccccatatagatcagacgagcttcttcatggccggaaataatttcaatcgggtaggggataacctctttagcgcgtttaataaattctttggcattgctggcttcacgtaagctgtgagtgcccaccagacaaacgttatcagcaggaaagccttgtaaccgttcagcaaataaagccagacaggcaagaccgcgtgttattgcttcttcgcttaattgattgttgttatcaagaccgtcggccagatggacccgttgttttaagcgacctaaaatctgaaatgcatcgttgacaattcgtgcgataatcatatgaaaactatttgaacctagatcaatagccgcaatttctattggtctgggcgtcggcttgtcatgtgttagcggcataaattaagctcttggttcaggttgttcgagggcttttagatagtcataaatagccagttgtgcccggattttccgcttattgccccgtagcacataactattgctcagctctttatcgacgtaacgggcttttactgtatcgttgaattgtaattcgagaatatccagtacccgttgtttcaattgtggatcaagcaggcaaaccgcaacttcaattcggtagtcgatattacgggtcatccaatcagcagacgagagaaagactttttcgtctccgtcattagtgaatacgtaaacccgatcatgttcgaggaaacggtcaacgatactggtgatctgaatattttcgctaaatcctggctggctgggcaccagtgaacacataccacgtatcagtaggcgtatttttacccctgcttccgaagcgtcgtataggcggtccaccagctctttatcaaccagattattaatctttaacataatacctgcgggcttattcgcgctggcgttggcgatttcctgtgaaataagctggttgagcattgcgcgggaattttgcggcgaaaccatcaggttttcaaatttgaccgggcggtagggattttcaataaagttgaatacccggcgcacttcgttagtaattttgggatttgcggtcagcaaggagtagtcggtgtagaggcgagcggttttttcattaaaattaccggtaccaatatgggcatagcgaacaatttcttcaccttccagacgggaaataacaaacagttttgcgtgaatttttagtcccggtgctgagaaaataacatgtacacccgcttcggtgagccgtttggcccaatgaatattggcttcttcatcaaatcgagcctgtaattcaaccacgacggtcacttttttaccgttatgggcagcatggatcatggaatcaataatgcgggagtcttttgctactcgataaatattaattttgatggagagtacactcgggtcgaaagatgcctgacgtaataattccaatacgtgttcaaaggtgtgatagggataatagagcagcacatcttgttcacgaatcgcatcaaaaccattgcggaaattatcaaaccaagtgtgtcgtaatcttggcaaaggtttattgagtaggtttctcttcccctcattggggaatttaatgaaatctttaaaattgtgatagcgtccgccagcaatcaccgagtcattgtttgacaagccaagtttgctacgcagtaattctaccatttcatctggcatttctcgttgataaacgaatcttacgggttccgctgtcagccgctgtttcagcgtggatgacatgagttcgagcaagcttgattccatctctgttgctaaatcatattcagaatcacgggtcattttcattgaataggcgttcagtgaatcataatcgaaaaagcctttgaaaatttcatcaagacaataacgcataatattgtctagcaggatcattgacttgcggcggtgtggcatttcgggcggcaagttaacaaaacgtggcaccttatctgacggaatttctaatagtgcatattgaatattctggctgtggacaatttcaactgccagataagtgtagtcatcttttagaaattcaaccaggttggtttctggattgatcagaattggtgtaatgtgtggccgcagatgttgacgaaaatattggcgtaaccagatttgttgattgggtgaaatttgtcgttcattgatgagaaaaatttgattgcgagcaatttctaataacagttcattatagagcacatcaaattcttgatcggttttagccactttagcttgaatttttttcaatacatttcgggcgctggtggctgatcctcgttcttcattaattaatattcgtcgttttacatcagcaaaacggactttgtaaaattcatccagattattggagtaaataccaaggaaccgcatccgttctattagtggattgctcttatccgccgcttcttgaagcacacgttcgttgaatgataaccaactaagttctttatcggtatagagcctgtcttgggacattgttactccaggtgttgaggtaaaagtattgaaactttgaatacgacggggcgtcgtttatcgctatcttctcgtcagtagttgctgactcattttttcatcttccttggaggcaaaatattgatgttggaaaacgcacatgcgaatggcggtgcggtaactgccattaataaagaattcgtctattaattcgccctcagtatagaaacctagcttattatagatgtgaatggccttgacattctctttatcaacaatcaggtagagtttatacagattaagtacggaaaatgcatattccattgccagttttgccgctttggttgcatggccttggccctgataggtgggatcgataataatctgaaattctgaccggcgatggatatagtcgatttcgactaattcaaccaaacccactttggcgtcagaactggcgataataaaccggcgctcgctttggtcgtgaatatgtttgtcatagagatcgcacagttcaacgaaagcttcataaggttcttcgaaccagtaacgcatgacgctagcattgttatctaattgatggacaaaagggagatcttcccgctcaagggggacgtaacctaacaggtgaggtatgagaaccaccagacatttgacacctcagtgtttttaataaaaaaggaacataattaatcatagttcgcagtgccgggtatgttaccacagcactgtaattagccgttaatatacccattagggtataaatagattattctgcggcatagccttctggagggaggatctttccatccagatacgctttgccattaaccatacttaggcgcccttcgataaaccagttgataactaatggatagatgttgtgttcctgagtctgaacccgtttgacaacctcattctcctgatccccggcaaaaataggaactttagcttgtaagattaccgggccgccatccaactcttctgttacaaaatggacggaagtgccgtgttctgtatctccatttgttattgctttgcggtgagtatgcagaccaggatatttgggtaacagagaaggatgaatgtttaacaggcggccaagataatgttgcacaaaatctggcgtcagaatacgcatataacccgcgaggaccagcaaatctggttgatactgatcaatcgtgtgttttagcgcttcatcataagtctgacgatctgcatagtttttcgggctaataacatgggtgggaatatccgcctgtttagcgcgtaacagaccgtaagcatttgctgtattactcaataccgcgcaaacctgcccattgattctgttctgctggcaggcatcaatcaccgcttggagattgctgccgctgccagagatgagtacaacgatatttttcattgaatgacaacctgttgttcaccctctttcagtgtcgcgatagtgccgatttgccaggctttctcaccggcagcagtgagtaattcaatcgcctgttcaacggctgttggtggtaaggcaatcaccattccaacaccacagttgaatgtacggtacatttcatgacggctgacattgcctgtctgttgcagccagttaaatatggccggccattgccaactggattcgttaatctgtgcttgggtattttcaggcaggacacgcggaatattttcccagaaaccgccaccggttagatgagcaatagcgtgaatatcaacctgttcaatcaaggataaaagggatttcacataaatttttgtcggggcgagtaggtgatctgccaatgatttactttcaagctcggttgcttctggatcggtgttgctgacggccagaattttgcgtatcagagaatagccgtttgagtgagggccactggcggcgagggcaatcaaggcatcacccgcctgaactttactgccatcaatgatttctgatttttcaaccacgccaacgcagaaaccggcaacatcataatcttcaccgtggtacattcccggcatttctgcggtttcgccaccaaccagagcacagccggataattgacagccttctgcgataccgctgataacgctggcagccgtatcaacatccagtttcccggttgcatagtaatcaaggaaaaacaggggttccgcaccttgaacaaccaggtcattgacgcacattgcaactaagtcaatgccgatagtgtcatggcgtttgagatccattgccagacgcaacttggtgccgacaccatcagtaccagaaaccagaattggctcgcggtatttttgtggtaatgcacataaagcgccaaacccacctaaaccgcccattacttctgggcgacgggtctgttttacaacacctttaatacggttgactaaggcattaccggcgtcgatatcgacaccggcatctttataactgagagaggttttgttggtcactcgaagcccccaaggcggttgcgtttgataaattaagacagaatagtagcaattctaacagtctaagcaaacgtttgcgagactcttgtttaggatctcggttctcggcaattagggctatgtttgatgaaaatcaacggattggtagtggtgttatgggtaaaagacggtataatctcgccgtttttttgtctgctggcgacatgacatacagtaggagaggtccatgaagatcgttgaggtgaatcacccacttgttaaacataaactcggtctgatgcgagcgcatgatatcagcaccaaacgctttcgtgaactggccgcagaaattggaagccttttgacttatgaagcaactgctgatttagaaacagaaaaagtcactattgatggctggtgtggtccggtggtagttgagcagattaaaggtaaaaaaataactgtcgtacctattttgcgtgcgggattggggatgatggatggcgtattagagaatgttcccagtgcccggattagcgtcgtaggggtttatcgtaatgaagaaaccttagaacctgtcccttattttcagaagttggcttccaatattgatgaacgtatggcgctgttggttgacccgatgttggcaaccggtggttccatgattgcaactatcgatttattgaaaaaagcaggctgtcagtcgattaaagtgctagttttggtggctgctcctgaaggtattgccgcgttggaaaaagcccatcctgatgtggaactgtatacagcttctattgatgagagactcaatgaacagggatacattgtgcccggcctgggggatgcaggcgataagatatttggtacgaaataataagttagccgactgttgagtcggcttcagattattgacaaagtgctggttttttatccgacactttgttcagattgctgacgaaccccattcaaaaagtggggttctgttgatgtcaatcatattgttgtagtgtggggtcttttagtatatcaaggtacccattttccagtgtctttattagatcaaagacttggccccgatagctagacttttgtcattaatccgatggggctattaaggccctacataatgtttactgacttcattttctagcgcttgattcacgaaagcgttaatcgtcacatcttcttcaagtgctagttctgcaatttttctatgcaattctggattaactctaacattaaaaatccctttatatggtatatcaggattcttatttaattccttgcagtcttgcaaatacaaatcaaccgagattttaaattcattttccaattctgcaattgtttttgcttcataagtcactaaatcgcggatatattccaatttaccaaaaagagtattgttttccaagtcaaattcaattgtacctaaataacctttatattttaaatatttcatatcaaccccacttcttttaaagtctgtttcacggcttttagtgtaccacctttaatgtaattttcaggatgagggcggtgcattaaaattgtgtgattcaatgattcattgaagaatcgtaccctcgaaccttgcttttcttatttctcatagtttaataggcttaataacacaacaagttcagaccattcaaaagttttttggctattaagaaacttttctatcagtttctccgctttgctcatgtactcttcctttccctcaataatgtaactaacagtagttacaaatatcaaataagtcaagtttcttgtgcattaatgtgaaagataaatgcgtacggtgccgcaaaaaaaaagaggttacaaagtcagttagcgatatctattagtcagaagtaacagatatcgctttaattttatgtttgttctgatttcaaattaactgatcaggtaccgcttattcattgaaattgtggcagataatcacggtttatcgttaatacgtcatccaatagtggtgaagcaatgtctatatcggcaaccagcgggttggtgatcagtgccaacagtgcagcattgcgatcgccatgaatcgctgctttgatcgttaagcgttcataggtttttatctgttgtgtcagagcatacatactgtcaggcaggcggccgaacgtcagcgggtgggcaccttctgcattaataatacaattagtttcaatgacagcatcgtccggtaaacctcgaatagcgccgtggtttgtggtattgaccaccaattgactattgagattgttatggatggcgcaaatcagatccagtgcaacctcagaatagaatgcaccaccgcggaaactgagttgttctggcttgtgatcgagttctggatccgcatacagttcaaatagttcctgttctactttcatgacctgttctgctcgtgtgccttgttcgaacgcagcctcgcgctcctcctgtaacatattgcgggtttggtagaagtagcgatgataagggcaggggatggcacctagtgccttgagtagcggcgggggccagggtgcttcttgaatattattcatggttaagattgcaccattgcatagcatatcaagtacctgttgagttttatcctgacctgaaaccagtacttgatgtacccagaccatatgattcagcccggcaaagtgtaactgcacgtcctgataagggcgttgtagcatattcgctatcatgtgatgcatggtaaccgggacattacataggccgataatttttgctttgctatagcgggaaatcgcttcggtaacgatcccggctggattggtgaagttaataatccatgcgtcgggtgcaagttgctcaactttatgggcaatatctagcaatacggggatggtgcgtaatgctttggcaaagccacctacgccagtagtttcctgaccgatcaagccatattttagccccagacgctcgtccgcaacgcgagctggaagctgaccgacccgtagttgagttaaaataaaactggcaccgcgaatggcgttatctggtgtgaaatggacgctgacaataacgtgttccatgccgtaacgagctaacatacggcgagtaagcgcggcgataatttctactttctgttttccactgtcaatgtcaactagtgccagttcagatagtggaatctcttttttatgttgaataagcccttcgactaattcaggtgtgtagctgctaccgccaccaataatggctattttgatttgtttcatgttttttcctcttgtgatgacattcggcgatagagttcaatcatatcgctggcaagatcttgaataaccattgcgttcattaaatgatcttgcgcatggacggtgatgagattgacaggtaatttaccgcagccttcatctaatccaatgagggtagtctgaatcgtgtgtgcttctttgatcgcctgttgagattcagccatcagtgtttgtgctgtttgaaaatcaccgtttctggcatgttgtaatgccattagtgcatgactgcgtgcgcttccggcataaaccagcagttctacaatagttttttctaaatcaatagttttttctaaatcaatagcttgttctaaatccatgtgtaaatcctccgaaaattagggttgggattgagtttctacacctgtggatgctgtgttttcttgctgtttattttcttcgtcgatcaattgtttttcataaattttgaagaagggataccagataaagagatcgattatcgtgagtatgataactagcactgccgcccgataatcccaagcggcggaaatcattgcgccgatgggtgccggcgtagtccagggcgaaatggcgaccattttatgtaccagatcaagatgcaggacgctgtaggacaatactgcattgaccagtggcacaaccaatagtggaataaataaggtcggattcatcacaatcggtgaaccaaacagcagtggttcgttaatattgaatatggatggaaccacgctcaattttccgatagtacgcaaatgtatagagcggctgcgcagatacagaatcgccagaaccaacgtagaaccagagccgccaatacagatataaaacgcccagtaaggatcggtgagaatttgtgttgcagcagtaccgtgggccattaatgttgcattggtagcaatatttgccataaaaataggggccatcaagccagtgacaatgttggcgccatgaataccggcaaaccacagtaagttagcaatgagtagcgccagtataatggcaggcagagtatcaccgacggaaatgaggggttggaacatctgcattatggctgcgggaataagtagattgaattcactctgtaatagcaagctggcaggataaacggttaacaagatacctatgactggatatagaagttcaaaagaacgggcaatggctggtggcacttgtgttggcattcggatggtgatgttatatttttttagtaaacgtgttagttcaactgaccagatagcgcaaattaatgcggtaaatacacctgcgccaccgaggaaatcgagtgctattttgttttctatttgtggtgctgctgctagcaaaaacgccatgagtgatagtaaagccgaagttaacccgtccagaccgtaggatttagctaaactgtaggcggtaccgaccgaaacaaagacactcattaatcccatcgtcataaagtaaggcattgtgatggtgtcccagtgagttttggcaaaggataaccaagcctggccgaatgaggatgtagtctgtaaatcgaaggggggatttgccacaattaacatcatgctgccgatgatcaaaaatggcatggctgagataaagccgtcacgcattgctgtaatatgccgctggttaccgattcgcccggcaaacgggataatgtggttttctaagacacgcataaaagaggtatagagactcatgagggtactccgcgtgatgatgaaattgtttattccaacaggctcaatgccttatcgagaaccttatcaccacgaagagtgccataatccatcatgtcaataacgtctattggtttaccgagtggtttggcaatagcggaaaaatgggccaattgatatctcacctgtgggccgagtaaaataacgtcagcgtcggctatcaggtgttctaattcaaccgtgggaacagccttgatctcaatgtccaatgcccgttttatcacttctgcctgcatgcgttgtactagcatgctggtggacataccggccgcacaacacaataggatttttttcattgttcagtctccagtttgttatatcgtttcttatgggataagtggttgatgagaactttcactgtttattaagactagcaacttatgttaaatatgttgcgattttgttcgcatattaatcaagaatagtttaaggaatagcgatagagtgtgatcttcgtttgtattgtacagagtgtgaaaattttaggttgtataggatgttgcagcgagatttttcactgatggaataagggtgaatgtttggatacagtaagtattggcaactagtgatgaagcaatgcgaaagttaatctctgaatcagatttcgatatcaaacttaacatgacagagaaaaatgtagaacacacccaagctttcattgaacgcggggtgcaagacttttctctgcctggatttgttacgccatatggttaccgtttgctggcatctgtttctggcaatcaatatagattggtgactgatgcagatatgccggagacggtttacgtggtaaagctcgaattcatggaacatattgttccatcgaagaaaacatgcacacagatactggtgtggcgtacagttcttcctcaacatgacggggcagtgagaggtttgtcacaagagttttttaggtttttccttgaaagatactccatcattgtgtctgacagtgagcaaacgctagatggacgtaggttttgggaacgtatgattgcttgggctatcagtattaatggctatcatgtgtatgtttctgatagcaccaaagaggagcgtccactgagcctgattacctcatgggatgacttctatgtaacctgggctaactattgctggggccatgacaaggattatcactatcatcgcctttttgttatcagtaaagagcgattacattgatctctgctaagaatgaataaaactcactatctgatagctttttcttaaataacataggactgaaaacttaaatttttcatgttgttacatgcagaatattttataggcgtttgcggtctgttctgtgctatgacgagatattatgcgcttctgagcctgaaaaggatttaacttattgaatcctaaaaatagtttttttattatttacctatacagttcatttacaactattttctgtgataaacttgttggcgtttattaccagctctgtttgaggtgcttctgaacacaccatcgcagctttcgttacctttgtatcttcccgatgatgaaacttttgccagtttctttccgggggaaaatgccaccctgttagctgcaatcaaattggccattaatcagccgcatggcagctatatttatttctggtcccgtgatagtgggggccgaagtcatttgttgcatgccgcctgtgctgaattgtccctgaaagatgaagctgtgggttatgttccgctggataaacgtgcctattttatccctgaggtgcttgatggcatggaacacttatcactggtttgtatcgataatattgagagtattgctggtgatgaagagtgggaaatggcgatttttaatctttataatcgcattctggagattggccgcacttgtttgcttattagcggcgatcggccacctcgccagattaatcttaagttacctgatttggcttctcgtctggattgggggcaaatttataaattacaaccgctttccgatgatgagaaattacaagccttgcaattgcgagcgaagttacgcggttttgaattgccggaagatgtagggcgctttttactgaaaagattagacagagaaatgcggaccctgtttatggcattgaatcagttagatcacgcttcgatagttgcccagcgcaagctgacgattccatttgtgaaggatattttgcacctttaaaggtgatggtgatatcacatctatactcgtcatctttcaagttgcctctttgttgactgcattcgctcaccccggtcacatagttatctatgctcccggggattcgctcccttgccgccgcgatccatcttgaaatccattgggtatattcttatcaatcaagaatttcttttactttttccggtgggcgcccaagtctggctttatcaccgcaaaccacgattgggcgctcaatcagtttaggattgacaatcattgctttcagtaaatcatgctgagtgagtttttcatcagccagattcaactctttgtatagatcttctttcgttctcatcaattggcgtgcatcgtgaaaaccaagctgttctagcagaacggataattgctctaccgcgagaggagcctccagatagagaataatctgtggcttaattccccgttcttcaataagtgccaaagtttcacggctttttgagcagcggggattatgataaatcgtcacctgttgcatgagagttccttaacgtttgtattgactgtaacgctgttgtagctggcgtaattgatcgatacgagcatcataacgtgcttgatcgtaactacctaattttacgagtgcactggcactactgaggtatttgatagcattgtcaaactgaccgcgaagtgccatttcttcagcgtgtgctgataattcttcatggcgtttaccttgtttggcggcggcttcggctatcaggtgccaaccgttgggatcatctggattattgaatgtatagcgatgaagtagttttaaagcctgttgatattgttttgcgtgaataagtgcattagcgagattgatttgcaataccaaattgtccttttgtttctgcaaagcgttctgtaaccgggtgatagcctgagcaattcggttctgttcaatgtcgatatcagtcattgtgtcaatgaaccagacattatccggttgttttgctaacagtggttctaaaatagcccgtgcctcagggtattttttatcttgagaaagcaagattgcccggccataagcagcggcaagttgctctttagctgtgcctctacggtagttttctaaaatttgctcaagatagccgcgttgctcggtggtgtacatgcccataacacgaactctggcgaacagaaaatcttgagattgtggaatgttttgggccgggtattgattagcacggttacgtgcatcagcaaggcggctgtcaggtaacgggtgagtgagtaacatttctggtggcttagaactgtaacgggtttgatctaccatgatctgcataaaatctggcataccttgaggatcaaagccagctctacgtaatgtctgcatgccaatacgatcagcttcttgttcattggattgagtaaaactgatcatgccttgttgtataccggcaatagtgccgctgagggctgccatccctgcttgtgggctcgccattagcaaaagaatagaacccaacgtacccgcccaagctagcggtgctgtacgttgctgatcttccatcattcgtgccaggtggcgttgagtaacgtgggaaatttcgtgagccattaccgaggcaagctcgctttcattacgactataacgaaaaagtgcagcatggagtacgacattaccgccaaagaaagcataagcgttgatattcgggttatcaatcagatagaaatggaaaggcgttttaactgagtctgcatgagctactagcctttgtccaagggcattaatgtattgtgtcaataatgggtcataaatcagcggagcgttgttacgtatctggcgaacgtagaaatcgcccattgccagttcctgattgatgctcaggattgaacctgccgtggtaccgatatccggcagtgaatcttcaatagaggcgctgagaacaggggagcttgttagcaataatgtgctgattaatattgctgtcagagattgattagacattattttcatgaaacaaaaatgctctcatttgaccatcgttttagataatgcgtgtatgataaacaagggtaccttaaaattaatcaattagtacaatttttaagaaaaatagaaatatgaatattgctatcaaggagcctggtcaatgctggatatgattatacagtggtatcgccgtcggtttactgatccgcaagttattgcgttatttgtcatcctgttggcagggttttgcattatttatttcttacatggcattttgacacctttgctggtggcgattgttcttgcctatttgttggaatggccaacggctaaacttgaaaaactggggtgttcgcgcacagtggctgtttgtattgtgctgattattttttccagtattagtttgttggtcatcttgattgtggcgccaactgtatggcagcagggaattaatctgttgtcagatatacccaatatgcttaatcggtttaatgaatatgctcagacattaccagcccgttatccggcgttggttgatgctggcattattgatatgatggccgaaaatttgcgcagtaagatttcaattgccggagagtctgtagtgaaattttcggtggcttcgctgattggtctgttaacgctggctatctatctgattcttgtgccactgatggccttcttcttgctaaaagataaaaaccagatgttgcaagcattgcaacgggtcctgccacgtaaccgcattttggccgggcaggtatggcgcgagatgaaccagcaaatcactaactatattcggggtaaagtcaccgagatggtgatcgtcggtatttgtacctacgcggtgtttgcatttcttggattggattattcattgctgctttctgttttggttgggctatcagtgttaattccttatgtgggtgcgttgattgtcacgattcctgttgtactggttgcgctatttcaatggggagtcggaacagatttctggactttgattattgcctatttggttgttcaggggctggatggtaacttgctggtgccgattttattctctgaagccgtaaacttacacccgttggtcatcattctctctgtgattacttttggtggtttgtgggggttttggggcgtattttttgctattccgctggcgacgctgattaaagcggtgatccaagcctggccggaagagatcgttataataggagacgatgaaataaaagagtaaatttatttttaatgatgctggtacccgttattagaggaagcacgggtggtgatatccctcccgtacttgcccctggcatcttgagctgttaaatgagcgtgattaagttttgagtcattttctatttaagggtgcagtttcagataatccaccacgatttggtgatgatcactggtcttaaatttatcaaaaacgtgctcaatattaccgttggtatcaatcaggaaactgatacggtggataccatcgtaggtttttcccataaattgtttcttgccccagacaccaaactgttcagcaacttggtgatcctcgtcggacaataatgtgaagttcagcatttctttctccacaaagcgtgacaatttacttgggctatctgtgctaatgcctagcacttctacacctgaatcctttaatgtatccatttcatcgcgcagaccacaggcctgtacagtacaaccaggagtcattgctttagggtaaaaatagactaaaacacgctggccttcgaaatcagataaattgattgtttctccatcttggtcaggaaggctgaactgaggggccttatcaccggctttcaatgggttcatcccgtattctccgtttaatctttcaactaaagtggttcaagaatactaatactgccttgtgcatttagatctgtacataacttattaaacgcctgcttaataattatgccatcatcctctaataggctgtgggcggtaatttggatttgcaatcgagcagggatattgccttctggtggatgtgtttttgataccagttcagcaatattaaaatcctgtgtagtaaacagattagtaaactgctcaacaataccggatgaatcatcaacatcaaccttaacggaaaccgtagcaggaaatgttgtgtgggtatcgcactttgtgcgtttcatgacgataagaagatcgagctcggcccctttctgtggcagtgaggattcaatcattgtgatagcgttccagctaccggaaagtagcataatgaaggtgaattcctcgccaaacatggctaagcggctgtcttcaatgttacaaccacactcactcacaagacgagtaatggtgttgacgataccagaacggtcagcacctaaagcggttataacgagaaaatgttgttctgattgtggcaaagtcacttttccttctctactgtggtttcgttaaggtaaacataaaaaggctatgctgccaaggtcaattgcatcaaagttgctctatacccgttatccttcaagttgcctctttgttggctgcattcgctcatcccggtcacatcgtttgctatgctcccggggattcactcccttgccgtcgcgatgcatcttgaaatccatagggtatatggtatttccattctctatcattgaatttcaataaattactttggttatcacatctttttaacagaggttatctggtattaacaaaattcattgaaatcctgtgttaaatagtttccttctgaatgactaaaaagtaccatggagctcttgtttgtatagggggttatgtaatgtctagcgggagatttgaatttacaggtagcattgttgcgctggtaacaccaatggatgcgagtggtcaggttgataaggccagtttgaaaaagttaatcgattaccatgttgctagtgggacatcagcgatagtctcggtagggacaaccggagaatctgccacattgagtcatgatgagcacggtgatgttgttttgacaaccatagaattggctgatgggcgtattccggttattgccggaacaggtgcaaatgcgactgctgaggcaatatccctaacgaaacgttttgaaaacagtggcgttgttggttgcctaacggtaacgccttattataataagccgtcgcaggaaggtttatatcagcattttaaaacgattgctgaaaatacggatttaccacaaattttgtataatgtgccttctcgtaccgggtgtgatctgctgccattaactgtagcgcgtttggcgaagattaaaaatattgtcgcaattaaagaagctacagggaacttaaatcgtgttagtcaaatccaagaattggttaatgatgatagtttcatcttattaagtggtgatgatgcaagtgggttggattttattcagctcggtggtaaaggggttatttctgttactgcaaacattgcagcgcctgacgttgctaagttttgtgaattggcattaaacggccagtttgcagaggcgcgtaagttaaataatcgcctgatggatttacaccgtcagctatttgttgaacctaatccgattccagttaaatggggatgtcaaaaattgggtttgattgctgatgacaccgtgcgtctgccgatgacgccattgacggatgcaggaaaagtctcagttgaaaaagccttgaaaatggccggattattgtaaaatttagggaattttaatggcaatattgttgcaaaaatcgaaggtgatgacggttgctggtatgtcacttgtcatgttattggcagcctgttccagcgaccagagctataagcgccaaatcaatgatgatgagacatatcttgaagcacctccccgaaaggcgttgaaagttcctgcgggtatggtattgccattgcagaatggtgaatatgatattccagcaatagcctctcaagggcaggttgggaaagcgcttgatattcgcccgccatctcaggcactagccctattgagtggttcccgtactgaaaacagtgcaaagagcagtaagttgctacttgaaagcactcctgagaatagtcatctgtggtcacagattaacaatgtgctattgaaaaaaggtttccaagttagccaacgtgatgatgctagccagacattgacaactgattggatcgattggctgcgtgcagatgaaaatgttccatatcaggctcgtcatcgtattagtgttgcacgccagagctatcagattgaattatccgttactaatgaagggctgagacaaggtgatcatcagataactgatcctcttgaaatccaacgttataacacactgatgctcaatgaattaattgaaggtgtgaaccagcagcgtgaacgtattagcgatgactctgtagcgcgtaatctaggttcattggatgtacagagtggtggtgatagatctggattacctcagatgattgttcgggcaccctataatattgtttgggatagattaccggcagtactggaaaaagtcggtatgaaagtgggtagccgcagtcgttcaacgggttctattactgtaacttataaaagtctcagttcatctagttggaaatcaatgggtgttaatgaaccatccattagtgaaggtgattacaaattacaggttggtgatttgaataaccggagcagcttacagtttattagtgataaaggtaagccgttgacccaatcacaaaatgatgaattggttgcagcgttgaaggcggctttcagccagaccacaggatcatagatctaggaaagcccctcatattattgacaaagcgctggctgtttagtgagcgctttgattgataaagcgctgttttttaaatcagtgtttgatcgctaaaatctcggataaaaaaacaaactagcgtagtgtgaagaatatcctctccacatcatttcttttcgatatagaaaaaatcggccctttgggcaggattttgtcagcaatctgttttattatttatctttggtatttgtatagtagtaatatcatagtagtaatatctctggagtatataaaatgcaaaaaaaagctgagttgtatcgtggaaaggcaaaaacggtgtacaccacggatgatcctgatttgctagtgctggagttccgtaatgatacatcagcattggatggcgaacgtattgagcagtttgatcgtaaagggatggtgaataataaatttaaccatttcattatgagcaaattggcagaagcagggattccgacgcaaatggaacgactattatcggacactgaggtattagttaaaaagttggatatggtgccggttgaatgtgttgtgcgtaatcgggctgcgggttcattggtcagacgtcttggtattgaggaaggtttggtattgaatccaccgctgttcgatctgtttctgaaaaatgatgctaagcacgatccaatggtgaatgaatcttattgtgaaacttttggttgggttagcaaagaacatttggctgagatgaaagaattgagcctcaaggccaatgaagtattgagcaaattgtttgatgatgcgggtttgattttggttgactttaaactggaatttggtttgttcaaagggcagatagtcctaggggatgaattctctcctgatggtagccgtttgtgggataaagagacattggacaaaatggataaagatcgcttccgccaaagtcttggtggcctgattgaagcgtatgaagaggtagcacgccgtatcggtgttattttggactaattacgcaaacgattacctgggccgaaaggcccttttatttgcacgagctatttgagatgcgttaatattgaataggaattcatttatatagtcgcgatatatttgtgaaaatcattataattcggtggaattattgctattttttactccatttatgattcattgattggaataagttatttattgttcattataccctatggatttcaagatgcatcgcggcggcaagggaacgaatccccgggagcatagacaactatgtgaccggggtgagtgagtgcagccaacaaagaagcaacttgaaagataacgggtatatacccgtaatcattgaagatgcttgattttatccgaaatggagatcattatcctcgctatgaaaatattcattaccgatgaacaaaaagccgaacttgaacatctccatcacacctgccgtgataagagggagtgtgatcgcatcaaagcggtcctgctggcctctgaaggctggagttcagtgatgatcgctcaggccctgcgtcttcatgaaatgaccgttaaccgtcatatcagcgattaccttaatcaaggtaaacttaaatctgataatggggggtctgatagtttgctttctcaagaacaaactgattttttaatcaatcacttatctcaacatcttttccatcacacccatgaaatcgtggcctatgttgctcagctctggaatattacctttagcattcccggcatgaataaatggctacaccgtcagggtttttcttataaaaaaccttgtggcgtccctcataaattcgacgcagaaaaacagcgacaatttattgaatattatgagaatcttaaagtcacagcgaaagacgaacccatcctttttcttgatgctgttcacccgactcaaggcaccaaactcggttatggctggatgcgaaaaggcgagaaaaaaacagtaaaaacaacaggaagccggactcgcctgaatatattgggcgcgctcaacctgaatgccattggtcgtacggtgttccaggaatatcaaaccatcaatgactacaacatttgctgttttttcaatgaaataagaaagtcttatcctgactatcatcaaaaaattcatcttattgtggatggggcgggttacaacaaagctcatcttgttaaggagtgggcttatgttagcaatattgagttacattaccttcctccctatagcccaaatttaaacccaatagagcgattatggaaggtcatgaatgaacaggttcgaaataaccgttattttgcggataaacatgaatttcgagacaacgtcttcaaatttttcaccacaacgctaccggatatagcggactcgctgatgtctagaattaacgaccattttcaggtgctaaaaactgcatcttgaagtttcttgggtatattcatattgagaatgtttttgatgataggttgttaaatgacctaataaagggattgacatggtagaataagctattaattttattttttggctattttcttgtgatagcgtttataaacatttcaatcagatcgtgataaatgcgggtattctgcgataattgcacttcgctaaatgtgaaccagatcttgctgttgtgaacgatcggttattaataactttgatgttggctgcatatactgatgttgcaaataacatttttaatttgaatgaggtgccataacctaaaaatgaaaagcgtcatgtcaaagaatttaactgtatggcggatactgctacagagtgccgtaccatttaaggggacagttgtatgtgcgtttttggccttaaccgttacattatcgtgcgatctaagcggcccttatattatcaggaattatgttgataaggcgacatcaggaacgactgttgatcagcttatcatgttggcaatcatttatgtttttattgcgtcgattggtgttatcggtagtctggtaaccagttacatgagcaccaaggctggttggggtattgctgataccattagatataagctctttcaccatgtgatgacagttttacctgtattggaaatagaacggcgatcacagggagaattgctggaaaatatcgaaggtaatgctgatattataggaaaaacgatttctaaagcaggctttaaggctattgctaatgtagcgctgacattagggacattggtcattatattcagcgtcatgcctcaggcaggtattgccatagcaatcgtcgtcatactcgtggcgtatgtgttgattcaattaaccagactttctgttcgccgctggctaattgcgcgaaatgaaaaagcccgaatctttggttttgtcggtgattcattacatgcaatggatgatttacagccattgtcgcaagcgcattggcctgccattgcatttcgtaaaatgctgtcaatgttgctcaaatttgaacgcagtgcttatattggtggccgggctttttggccaattacccagatcttctttgcactctgtttcggtataggttttggttttgggcttcaattacttggtgagaacagcttaagcatcggcacattaacgatggtttatctttacgttgataaactgcgggagccggtggaggatatgtcatcggaaatagagctaatacagaaattatttgctgctttatcactttcagcaaaaatgttaaatgaaggcaccccagataaatcatcggataatttattgcctgatggtcctctctctatccatttcgataatgttgatttcagttataacggagaagaaactcaggttttgcacggtgttaatttttacgtcgctccggggagtaaaattggcattattggtagaacgggggcggggaaaagtaccattcttaatttgatgtgtggatttgcgcgacccgattcaggaagagtgaccattggcaatgtcgatgtttcaacgattaagccggaagagtttgcgaaaaagattgctgttcttagtcaacggtctcatctgttttccgcaacattgcgggagaatttaacgcttttcagtaatgaaatatctgacgatcaaatttgggaggttcttcaagaattagatgcgcttgaatgggttagagcactgccagatggccttgatacacaggttggtactaatggtctgatgctatcagcaggagaaattcaaatgatagcgggagccagagtgatgttacagcattgctcgttggtgattattgatgagggaacttctcaacttgatccccgaacagaagagagttggctgaaattgcttgaaaagttaagtcacaattgcacggttgtgatggtcgcacatcgccttcacacactttcggtcgttgatgaaattatcattatcgatgatgggcggattcaacagcgaatccctgaaacagaaatcgcaatgttaacgagtaatcatgggctcatggtatgactatatccaatgtatcaactaaagttaaaatgttaccggccttgactgagctgataaaaaagtttgctcctctctatttcattaccatgtttgtgtggacattgatgcatggttttcctctgttgattggttaccaaatcagcaaattactcgatagagcgatgaatgagccaactaaccctgtggtctggtggttgcttgcctctgcgattgccacaatggtcttgcgatcactatttctgttcttggggttaacctttgattttacgttaatcttcaaagtcagcgcttacctgaaagagcgggttttatggggagtaagccactgttcccgcaatcagagacagactttttctcaaggcgatattctgaaccgtattcgtgatgatagtgatgaaattgcggagtttctaagttggacctctgattttatttaccgcgcattacttttaattatcgcattggttgtgcttatcaacactgacataataaccacacttgctcttatgcctatgattgtgggcctttgggttggagcgatacttaaacgcaaggtagggaatttacagaagagtaaacgtcaatcgcaaggggatattgccggcaagattactgacgtcttaacgggtatacgcgacttgcgccttggcaacaaaatggaagggcagattgagcgattatcgcagaaatttgtcagtcgacgggcgattcaagccaaacatcaggtatttactgaccttctttctgggctgttcaaaaatattgtcatacttgggacgtcggctgttttattgatagtgagtaaacggatcgttgatggcagttttactgtagggaatctggcactatttttgacctatatcggttggatcagtgaacagatactcttctttggtcggtcagttgcctattataaaaatgctgatgtgtgttatgggcgaatcagacagtttctggcaaataataaagtagataaaaaagagaccaaagaatatgagccagatgaaattctgcataagttaagtgttaatcatctcgcttactcaaaaactcagcccccagtttcgtttgaggcaacggctaatcaggttattggcattgtcggtgatattggttcgggtaaaaccacttttttgcgttacttgattggtctggaaaaatccagttccggcagtgtactgtggaataaccgagaggttctgggcaatgaaaactggtggcggaatccacgtattggatatgccagacagaaagccggtttttttggtggaactgtaaggcaaaacctcgcgttgggtgataaggatatcgatgatgatgtcatggtacgggcgctggaggcggtaggtttgacgcccggctcatatgaattgccagacgggctcgatactgtcattaattctggctgtgccggtcaattatctggcggtcagcgtcaacgtttggcattggcccggatgttatgccgtcccgctgacgtttatattgttgataactgcgattcatcattagatacggatacggcccgtcgtttatggactgttttacctgagcattggcctggtttgtggattgttgtctcgcataatgccgatcttctcgctaaagcggatcatattgttaccgttcaacagcggagagaattagcataatccattggatatccactcctggctaagtcggtaggagtggatgtcaataatgaaatggtatatattttttccatatctggtgaaaggggattatgagtaagtaaactatttatagtatgaaacttgaatcagatctgcatgattacttcgtggctgctattgcggtgaatatgtgtatatttgcaatagggttgagttggtcgttcactctgttatattgtaaatatgaaaagagaggttgttatggtaaaaatcgctgattatccacaaatgaaaaattatgcttggtatttggctgaggatattgagttaactgatcgtgatgcgcttgcattttacgaacgcaattggaaatatatcgaagaagataagcttggacttcaagagcgtcagctgattgaacgactcatccatgagcaggggaatggttttttgaatgtctaattctcgtcttgaggcagcagaatatcgcccagcctgtgaactgatgtgtgaatatgtccagcgtcataaatatcgtgctttccttcaggaaaaggttgatatcgcacgccaatctgtaaaagagggtaatggtgttgaacatagcgacgtaaaagcgatttttgcggctcgaagagaacagtttaaggctcgtaagtgaacgtaatttggacacctcaggtgccatcgactggtttatgagaactgtctggattttagctttagtgcatacatcacgattgtggccgtaggaagttgagtaattacatgcttattaagaaattaattgccacattggaaggtgaaatacagatattaataaccacattgcttaatgagcaatgggaagccgctagggaattaatgaatgaatcattgcgtatggcggctgatgatttagctttaactgtattggcagacagtttgtgtaactcagatatcgatattatttatcagcagcaaggtgcttgtcatctgcggctaaatactctcaatggaaagttcaatctttatattgggattaaagatcggcaaattaattctctctcgttatctcgatgcccaatacctgatgcgtatgcaaaacagggtatttttatcgaaaaaacgttaaagacgtttggtcttagagatgtcccggatggtttggtctgtttgccatcaccacataatgatgccaaagcacttgtactattgcttgcaggttctggtcctcattcgatggattatgatgttgggcctaattcactgtttcgtatgctggcacatgaattaagtcaatatggaattgcgagtgtacgttttgacaaacgctattaccgtatccggcagagaaatatggaccctgaggttgtcgatctcaatacggaaattgttgacgatgcttgtaatatactgaccggtttaatgggacatattgaatttcacgatgtgccagtatttctggttgggcacagtttcggcggatatgtcagcccattaattgcagagaacttacagcaaaaatcgggtttaaatgttacgggtattgcgatgttggcggcgcctttccgtaatttactccgggtgattttatcccaattacccagtgggaaagagcaagatacgatatctcttgcgagctttttatcagtgccggatagttatctcaaacagattgagaattatcatgcatttgactgcttaaacagcttgcctgccatgccgttattttttgctcagggagatcaggattgccagattttgcataatgttgatttcacgatgtggaaaactgcactgcaaaataataggcaggcagagttcaaactctacactggattgaatcatattttattgcccacaatggggtgcgatggtggagaggattatctgcacccaggtcagatcccggcgcaggtaattgcagatttgactgcatggatcatccaccattcgtcatgaaataggcagcgctattcattttttgcgagcagcttgacccaatcattgattgtcggccagcgggctaaatctgcaaagttaattggataccccacatcatttagccgatcaaccagcatcagcatttttaccgaatcgaaaccgatatcaaaaaggttttcatcctccggtattgtctctgcttctggatgaagcgctttgatttctcgatgtaaaatttcatagataagctgatttttcattgtgcctccaaaaagttttatgaaacaaaacaaactacaattctctgataccttcgattggcgctgatgcagctgcacgatgtgatggatatacaccaaacacgacggtaataaagcaggctgcaagggaagcgagtaaaaaggaatagaaagagaagccaaccgtaatatcaaatagtaataaaattctgaaaccgataaatgaaaataacaatcctaataatgttcccaataatgaaatcaaaaatgcttcggtaagaaactggtaaaaaatgtcggaataactggctcctacggcaagccgtataccaatctctcttctacgttctctaacactaatgagaatggtattcatgacactgacacccgcaacaaagagagtcactgatgatattgataagaggaaaaggttaatttttgattgggtttcatgcaaggttttcaacaattcggtggtattacgtatctcgtaactttgttgatgtttaaaccgtgacaaccgttgttcaatagcgtatttaaccggttcaatatgagaggcatctttggctttcaacaccatgccactaggcggcgtatgaccgaacagccgtaccagatagctgttgcttggcaaaaatgcggcatcatctacccctgcgtccataccttcgcctttctgtgtcaggataccgataacttgcatcgagatgtcgttaatcttgatgctctgcccaaatgcggtttctttttgcggaaaaagtctctcggccagagatgctcccaagacaacgacatttgctagggcagtattgtcttgtggtgtgtaaaaacgtccacgatcaatcaccagattacggataatcgcgatatctgcattggcaccaattaattgaacatcagcagagccttgtggagaaacgattgttcctggcgcagtataaaatagagtgctgtggctaatatggggattacctgaaagtgacgttatatcctcttgtgtcagataatcatgatgggaatcgaaagcgccgttttcttgtcccttatattttactgaaatgatattacttcccattgaggagaccatcttaacaatatgatgcttggtttcttcgccgattgcttgcatgatcacaatcgaagctacgccgatggcaatgcataatagcgtcaggaagactcgtgttttatgggcggcaagagagcgtaccgtcatcttgagattaaataggatgacggttgaataaatattaaattttaaagttattttactcatgctcattgagccaccaaagaaccactgtccagatatagtcggcgtttggcatattcggcaacaacttggtcatgtgttactagaatgatgccgcatccattatgatgtaactcagtaaaaagttgcatgaggttggtcgcattagtggtatctaatgcgccggtaggttcatcggcaataataaactttggattgttgatcaaagcgcgagcgacagcaacgcgctgctgttctcctcctgatagatggcgcgggtatttatctaataaattgtcaagttggagacgatcgattaagtaacggaaatgttctctgtcataatcgaagtttctttttaagtagtacatgggcatcaagatattttcatcaatgcggtagttttccagcaggttataattttgaaagacaaagccaaaatattttcgccgtaaaagcgccaatgagtgaatcttttgctgagttaccgtgagatcattaataagatattctcccgcactggcgatatccaaaagtcctattatattcaataaggtacttttccctgaaccggagcgaccaagaatagcaacataatcattttggtctatggttaagcaaatatctttcaggacaagatgttgtttaccctcattaccataggttttgcagatattatttagcgttatcattttggatcttcccaagattatcttgtttggaaagtacaacgatctgctcgttactctgcaatccgctgacaacgactgaacgccttccattgttatgaccgatcaataattgtcttactacgatgtttccatctttcatctcacgtaaaaaataggtagttagatcatcgttcaaaggttgatgccgtttattattcagtatatcactgggtatagtcactactccggtgctttcgtgggtcacaatagtgacatccgcactcatactgggtttaagcaggaaattatcattagggacatcaaatagcacagtataataaacagcattattaatgagatcgggtttatacataatcttcttaacattaccgtgccatatatgctgatttgtactatagatcttgaaggaagctttttgccccgtcacgatttggttaatatctgcttcggaaacctttgcataaaccgtcatatttttgaggtcggcaatttgcatgagaaccggtgtctgttgattgacatttagtgtttgcccggggtcaacatgaattgcggtcacgacgccagcaataggcgaatagatttggctataactgaggctgacttcttcactgtgcaaaatatgttcattttgcctgatgtctgctttgagactttcaattcttgcctgactttttttgacgccaaaagcagcctcatccagcagttgctggctggttgcggaacgcaggttaagctctctttggcgtttttccgtgatgaccagaagttgataagcgtattgttcttcttgcaacatggctcgcaatttttctagtcgcgctcggcttgcctcaactttagtacgataaaaagtatcatcaatgctagcgaccagcttacctgtttcaacaatatccccgacttcaacatataacttggttaactggcctgaaatttggctaccaacattgacttgactggttggttgtacaataccggcagcattgaccgtagtaataacatcacctaacgttccggtgacgatttgttctgtcatcaccgtagatgtctctttttggctaaagtggttataagccacggcaagaaaagcgatcatgatgatggtgataacaacccatttcttttttttgaccagcacaatcagcatccattttacgatttgttatcgttccgtatcaccaggcatcaagttatgctgagtgcctatgcaatccaataaatcaatcaaaaacagccccatgtcgctgatgatatcttcagagaaaatatcatcatcgtagagccattccagacctattccagttggcaaattgatcagttcgagcgcaatatctcctttaggcttaagccccttgattttttctttggtgcaacgggtttcaccaagatataaaccggtttcaaaccctatttgagaagaaaaataataagtgacttctggcaattgcataccgtgatggtgatgaagatgttgttttaaataggccagtgagatattggaatgagtattcgcgtcggccagaaattcgcggacatatatggataggttaatcagcgaagtttccgcagtaacgtagggcagcagtagtgtggttgcgaagctaccaacactgtcaaacgatatgggaggagctcggttggcacaaggaataccgacgataatctcatctttattgagtaatgaattaatggtcatcagaaatgcgccaatcataatatgttccagagtcaccgcatattttttctgcgtgctggatagttcggccattaattgtggagacaacggcattgaataacgtcggcctcgggccctaagatgagtttccgatgactcattattctgtccgacaaccgaaaggacgttgaataatttttctgtccaaaaatttaatgtttcgtctgacatgcgctgattaatgacattaatgcctgtttccgtcgcagcttcaatcttcggtacattatctgcgtaagcggaagataatttttgcaacacatgagcaatcgacatcccgtcacaaaacgcatgatggaaatttaataaaaggtagtgctcatgttctgctatttttaataacttaaaatataccggtggattatcctgtaacgccatcggcttaaatgccatatcatttaagattttgcggaatgaaatttcaatattaatgccggtagcatgagttaaatcaatatattcgaaaggcaggttctcttcaatagcaggcgagaaggttaaagagagctgcccatctattatggtgactctttggcagagagcagggaaatattgcatgatatacagcaaagcgtaacgtaatttctttaaatcaatctcgccgatcagatgataatatagcgggatattatgagcgccggaacgattagagatagtatcgataatccaataatattggtcgtgttgttctgtcaggcaagaactatttttatcgattaaaaccggtatttgcccttgttgaatgacagattgtaatagataacctaatctaggggtgtgatagaaatcttccaggtgaatagaacaattaaaacgttgctggatcttgtttattaataataatgccttaagcgaagtaccgccggcatcaaagaaattagtctcttcatcaacaatgccgtcgctatcgccaaaaacttcccgccataaagtaaaaaatatttctcgtttttctcctttaatctgcgaaatattatcttctttattcaattctgatattggagcagaattgttggatgatgataattcgacaataaaaggtacctgcaattttggataacatccacgcaagaatgagacgatttcgtgacgtgtaattgagcatgatctatcaggtataaatatattaatatattggtagccagtttcattttcttttatcgctaaatgaatgtcatcaatattaatcgccgccgtaagtaatttttgcatttcatccagatcgacacgtttcccgtcaattttatgttctttatccagacggccaatgaaatttaaattcccttgggcatcataaaatccacggtctccggttaaataatagatttctccatcgttcaactgtaagaacctacgtgaagttgactgattatcgttaatatatccgctacagatagaatcgccacggatgcatatttctccattactgccattaatgatcttattagttccatattcccgaataacgatattggtattggctagcgctttaccaatgatattaccgggttgaaatttatcagctattttgtgactgctagccacaacgcaacattctgttgggccataagagttaatcagagaaataccacatccgactttttccaaccaatgatgaatggctttatccattgccagatcgccaccgataattgtcattctaatcgaaggtgcgagttctttaatggctgcatgtaggaaaaagacaatttgatgccaataattggtaggaaaattaactatagtgaccgattgtgcatggcaaaatgaaaacagtgtctcaagttcaacgatcatattatcgttggcaatggctaatgtggcaccttgataaaaacatccgaacacttcttcaatataagcatcgaaaacgggtgtgctgaaattgagaataacgtcatcttgtttaatatcatactgctctgtcattgcagccaaataggcataaagccccttaaacgttattggtactgctttcggtacacctgtggtgcctgatgtgaaaaagatataggcttcgtcttcttgagtcgccggacgttttatatcatgccccagaaatatctcggaagggcgagtttctatatcttcaataaagagaatatgcgtattattaacaccgtttattttttcatggtaatgacgagcagtgattaataaagaaatattcagactatttaatatgttatttatctcttcttgaccaaatgtcatattgattgggacaaaacataatcccgcagtatggatagataatatagataataaggaatccatccctctgggtaataatacggctacccttcgattttgtagtgggcaggataatagcaattgactgaaagtgaataatttgtggtaaagttcaccgtaattaaggcgatgcacggtgtttatttctgtttgatctccatgaatgactgattttttatccggcgatactgcaacgatttgtgctattcgggcaataatattctctttgataggatgattaataacaatatttttggggttatccaggctagatataatattatccgttggttcaatttctttatatttcacccaatatgcctcaacggtttcattaatattttctgcaatcgtactataaatatgtaaataatcgtcgatcagagtatgggcggcaaaatgactatacaggcggctccccacatccaattcgactaatgctgatatcccatcaggagaaaaccggatgttaataccataattattgaccgcgccagaagtcatacaaccgcgtatagcgcgattatctttcataagatcatgttcaagctcatgcagcaaattaacatagggggcggcaatgaattgatctgcccgattgattgcttcatcattcaaatcatttatatcaatacggctatgcttgctatgcagactaatttgcgactgcattgctacgaggatctgttttatggttgcctgtggggccaaagaaaccatcagaggtaacgtgttcattgccggacgataatagcggtattctcctttatcacgtcggttagagaaaggtaaattgatgatatttgttgatacgcggcctcgtttgctcatttgcagacataaagccaacatcatcattaatttatcattgaaagtaaaactatggttgtttgcggtgagcggccggcttactttaattgcttttgagggaaatagacgtttacgggtataatcctctaatttgggcagttggttgaggtaattattccaatactctttgttgttagcataatgcacgtttgctttatatttaacctcgtcaagataagcctgataggtaaagatcggtgctgatgttgggtggaatgtttgttgttcatagcaagacaaaacatcatgaatcaactgacctatgccccaataatctgtggcaatatggtgagcgatgattccccagaaacagcacccaacatcattaaagtaaagataatgccttatcgtcacacccttttcaggcgctagcggttgagttgttctctttgcaaaatccgcttttgccgctggttctactgctggatctgacagttttattggtataacgtcgaccggcgtagagctcttttcctgaaaaatattgtgttcggcaatacggtaacgtaaggaaaaaccatcattgaattgatgaatggtaataatggcctgcttcaatcttgccagactaatattatcactgaagctgatgaattcaccgacattgaagacagacttatcgtcagcaacagtattagcaatagctaagcggagctgtgtataattcaacggccaatagttgttattatattccattattgtgcggctccacgctatattttatcttgcaactcgccctttattttttcaaaaatagattcatctatgcataatccaatattaccttctgaattaaagcagatcagagggcgtttgcttacacgcagaatgaaatatttattttttcccttgtgatagtatccagacgaataatggataatatgtataccattgcttcggctaaaatcttccaaggaaacgcctgcttcccggcgtaatgaggaaataacccattcgtgtgaatataccccggacttcatcaataattttccttccttggccacggctttatttgataacagttgatagcctacaaataaggcaatgatgataaagagagtcgtcgcaatacttgccgccagcttgttgggattgctgttactgagccagtatggcacaggcagaaaaactaaagcgatcaggacgagcatagcgacattcattaatatgactttgaagtctggatttaatcccacgatattattcatgctgctgccattcctaaagataattcggtaaagagatgaatcacttctttacgttcttcacgtgttgcgggcagattgatataaccacacttttgcgccgcaaacaggcaagcggtgatttcccttctgacagcttctttaaccagtgtatcgaccatttcttggttgttatagagtctggcaagatgaagagaagccgtgccggctgaaaggtcgctatgatcaagtttgggtaaataatttgccatacatacagtcaccgctgtttgtaccgcgaggcttaagtaggctactacgttaactgccgccgccgcattcactgctgcgacaactcgggtgccgacagccacgttgaccgcagcaacgacattggcccctacggcaaggcgagcaatttcaatactggtatcatcttcactgtttaagggttccagaatttctttcagccggagaagaggaggactgtttgtatcttggagctgataggattcgatgttttctttaaaatgtgcgaacaggctggcatcttgattgagatggtgattgattcggcttctcagacttgagcccctttcgtttaaaccataggtttttaggcgggaaaagagcgcttcatagtcgttgatttttaccgcattcattaagtctttatcataagtgatgaataacagtaattcctctgcggaaccggggctaacgatatctttgtctatgccaaattcagctaacactttttccggtgactcccggtattctaatgctaaattgggctgttgttgtagggtttcccagaatcggttataggtgatgatctcttcccaaacttcaaccgggagtttggcgtttgacattgacaaccttagcttattttcttcaacctctcccggagagagtaatgaacgtggcacgccaaacaggcggttgctatcagtgctagcattgacggtgggtatgacactgccaatagctgcaccggcagccacgccaataaatgtacgtcttttcatcattcgttcctttataagttaacggaattctttttttattgagctttatacccgtcatctttcaagttgcttctttgttggctgctctcactcaccccggtcacatcgttatctatgctcccggggattcgttcccttgccgtcgcgatgcatccatagggtatatataagataatatgtaacctttccttattaagcttcttcattactgagataatttcatgaaataattatctaactgatatttcttacctgctatattaattgtaagtgtatattgtgatgaccataacagtatttgggtatatacccgtcatctttcaagttgcttctttgttggctgcactcactcaccccggtcacatagttatctatgctcccggggattcgctctcttgccgccgcgatgcatcttgaaatccattgggtatagaataatttaccctccgttcgattaaaggttagatggtactaactattagctggatggtgacattttgcaataggttagttgattaaatttatattttgagcgtttagactaaatatatttttcgacaaaatatccttatttagagtccgatcacaaaataacaagtaaaaatattcataaagaagaataaaatatttcttttccttgattacctccccatttaataaaaatttgttaaccgaaaaagagttattttggcgatatttgttagtaataacgttaaaatatggattcgattctgttatattttcattcttcaattaagttaacggcatttttttctgctgagtagtagatgagatccagccgttctttagcgttaaatttctttattaccggaataatttctttgtgataattatctaacagattccggcgtgtcctctcgtctttatgcaaatgagcacaggcttggcagggatgaacgattttttccagattaatattgctatcctgcgggcgatatttttttaggatgttgtatggtccctcagttcttaaccagactttcataaagtcttcttcctgacctttaaaaagctgagatacatcgcctccttgtaaacggccaagtttcatttcggggatatgttctaatgtcagcccacagcaagcggaaatttcaccgtgtggtgtcagtacaatattttcaaagacctgatcgcacccttttgccagttgctgatcccggtttggaatatcttttcgttcttcgctggtgtcataaaacggcatccaggtatttcgctgtaaattaatcttgttttgctctttcagtcgcttaataacgggattctgggtgatttgcgttgcaatggcggaatcaaaggtatcctgttctactgtaatcagtgttgtaatattttgttcggccaatgcttctgccgctgtcactacgctatcaaggggaatccattcactgtgatctttccctgtactgatattcatctctgtgatgcccgcatttattaaatcttgagcgattttttgcgccttttctctatttttcccccaataaccgttagtcacgcaacgagttaataagccgtgatctgaggcaaagcgaatggcttcaatcagatctttacctagcaggaaacactccccaccactgaaaacaactaactttagccctggaaaattagcttttgagtgtgcaataaattgtttaatttcatccaggcttaaacgcgcttttaccgaggggttacattcaaaacaacattctttgcaagcagcattgcaagtataggttgtgatcacggtggcggtgtttggatattgttcccaatatccaggagggaagcatggcataatttacccctgttggattaaaggtgatacccgtcatctttcaagttgcctctttgttggctgcactcactcaccccggtcacatagttttctatgctcccggggattcgctcccttgccgtcgcgatgcatcttgaaatccatagggcatatacgttactaactattagcaatatgattttattttgcaatgtattaggtaattaaatttgtattttgagcgtttgctcgaagtatgatttgttacgaaatgaatttatttagaagcagctcacaaaataagagtcgaaatatttctgatgggagataaagtaaatatgtataaacagtaatcgacgattgttcaaggtattgaatattattgtaaggaataaaatcatgtctattgaatttacaccctggccggttgagttagcagagcgttatcgtgaaaagggttattggctgggtaaacccttaactgacatactttataaacaatgtcagcgacaacctgaagcaatagctattatctgtggtaaccgtaaatttagttatcatcaacttgatcaacaatcatctgcattagcctcaaatttaactttagcgggaataaagagaggtgatactgctatcgtacaattgccaaatatagctgaattttatattacattttttgcgctactgaaaatgggggtagtacctattaatgcattgtttagccataataaattagagttacttgcttatgcacaacaaattgatccaagtctgattgtactttcgtcagagcattcacttttacagaataatgatttcctggagcaattaaaaatacattgcccacggttaaggaatatcgtcgttgatggtcgaaaaatacaatataccaatgaattaaaatcgtggttagagtcaacaaatttacctttgaattttgaggcgacacgttcagatgaagtcgctttttttcaactttcaggcgggagtacagggacacctaaattaattccaaggacgcatgacgattactattatagtgtgaggcgcagtgtcgaaatttgtgagttgacacaacagacccgttatctttgtgctttgccggcgcaacataattatcctttgagttctccgggggcgcttggcgtattttatgctggtggttgtcttatattagcaacagatcctgggcctacgacctgctttccacttatacgtgaacataaagtaacaatgacctcattggtgccatcggctgttgcgttatggattcagacgatgaggaaataccaatattcactagaaagtcttcggctattacaagtcggtggagcaaagttaagtgaaagtgtggcgcgagtgataccgaaacttttttcatgtaagttgcaacaggtttttggtatggccgaagggttggtatgttatacccggcttaatgacgatgatgagcgtatatttaccactcagggatgcccaatgagtggagatgatgaggtacgtatcgttgatgataacggcaatatacaagcgccaggttcagcggggatgttaatcattcgtgggccatatacattccggggatattataaaagcccagcgcacaatgcgaaggtattcgacaaagaaggtttttattataccggtgatttagcctatatgacgaaagagggttatatatgtattgtcgggcgtgagaaagatcaaattaatcgcggtggtgaaaaaattgcttcggaagaaattgaatctttgctactcaaacatgaagatgttatccatagcgctttggtttcgatgcctgatcctttgatgggagaaaaaagctgtgcttttattgtggtggctgatccgaatataaacacgttgcaactgcggaaatatttaaggggaatggggattgctgaatataaattgcctgatcgtttcgagattattgatgttatgccggttacacccgtcggaaagattgataaattattattaagaaaactcattcgagacaaattagaaaattaattaatgacatgaaggtattaaaatgaccattccatcattgaaaaattatatgctacctcagccaaaagattttccaggcaataaagcatcttggttattcgaaccccatagggcaattttacttattcatgatatgcaggactatttcttacagtttttcggtgataatagccctctaatcaataaattaattgaaaatatccatttgttgagagtcttttgtaaagaaaaagagatccccattatatatacagcacaacctaaaatgcaaagtgatgaagaacgcgcattacttaatgatatatggggggccggcttgaatagatcaccccatttacaaaatattaaccctgctttggcccctaataacgatgatattgtgatagttaagtggcgttatagtgcatttcaacgctcttcgttagaaaaaaatataaaagacttaggccgggatcaattaattatttgcggggtgtatggacatattggttgtatgattactgcggttgacgcattcatgagagatataaagccttttttagtgggtgatgcgatagcggattttacgctggaagatcacctcatggctttaaaatatgttgctgaaaaatcaggaatggtcatgagtactaaagaaataatttcatcggtaaatttcgataaactgaatttataaaaaatgcataataaatcgctattaaaattaaagaagaaataagatgaaaaataaacaaaatttacaaatggattttagccataaaaccgtctgggtaactggggcggcacgtggtattggtgaacaaattgcccgtgattttaccgcgctgggcgctaacgtaataggtttcgatcgcgtatttgagcaagataatttgccttataaatgtatacaactcgatatcagtgatccagaaaaggtcgaaatgatctgttcccaacaactgtctgtctcagccgagttagatattctggttaatgctgccggnanattacaattgggaaatattgatgagctaaatattagtgactggcatcgttgtattaatgtgaatgcttctggggctttttatctatttcgtagcgtgattccccattttaaacgtcagcgtggtggcactattatcagcgtcagctctaatgcggcacgtgttccacgtatgcaaatggcggcttattgtgcatcaaaatcagcactgacaagtttaacgcattgtgttgggttagaacttgcgccgtttggtgtacgttgtaatgttgtatcgccgggttcgacggatacatttatgcagcgttctatgtggaaaaccgatgatgatgaaaaaaatacgattaacgggtatcctgagcgatataaattaggtattcccctcggtaaaattgcaagtgttaatgaaatttcacataccgtactgttcttgtcttctgatttggcaagccatataacgctacaagatattgtggttgatggtggtgcgacgttagcttgttaattgtttgaattaatacgaaaatacctgtcatttctgtaacgtaaggaaaaattgccctagcctaataggattaataccctatggatttcaagatggatcgcggcggcaagggagcgaatccctgggagcatcgataacgatgtgacctgggtgagcgcgtgcagccaacaaagaagcaacttgaaggataacgggtatataccctatagatttcaagatggatcgcggcggcaagggagtgaatccccgggagcatagcaaactatgtgaccggggtgagcgagtgcagccaacaaagaagcaacttgaaagataacgggtatagggtattgaaatctatgagtcatctcgatcctactttactggtgctgctcgtgttggcagcactgggtatcatcagccacaacatgaccgtcactcttgcaatgctgctgttgttggttatccgcataacgccactgaatcattttttcccgtgggtggaaaaatatgggttgactatcggtgtacttattttgaccgtgggagtcatggcgcctatcgccagtggaaaaattacggtacaagctgtcctcaactcgtttatgaattggaaatcgttgctcgcgatagtaataggtgtattagtgtcatggctgggtagccggggtgtttcactcatgtctaatcagccatcaacagttgctggtttgctggtggggacggtattaggtgttgctttatttaaaggtgttcctgtgggaccgctgattgcggcagggattttgtcattgttgattggtaaatcatagccttatgttgccagaattgagtgtgatacagactgaaatgcagcagcaagggttacgtcgtttgctggtgttgagtggagatgatcattggtgctatttacaggctaatgaattacagcggagatttatcggtgattggttatggatctctcatcgtaaacagcacgctgtgttgccagaaaaggcggtcagtttattaggtcaggaatatctgcacggaatatttgatgctaccgaaggttttaatgcggaagcactggcgatattggcaggtacattgaaagctggaagttggttggtgatgatggttccatcttggtaccaatggcgtgatcaacccgataaggatagcgcgcgttggaacgaacagttagaggcgattccaacaccgcattttgttcagcatattcagcagcaaattgttagcgatccccaagttttactatggcggcaaaatgatcccttatgcatccctgtatttccacaatacagcgcgtggcaactgcctaatggcagcccaacagccagccagcatgccattttggcgcgacttttgcgggcaagtcagggggtatgggttattactgcgccaagagggcgaggtaaatcgacacttgcaggtatgttaatgcagcaatggcaaggaaattgttggttaactgcaccggcgaaggcaacaacagcagtcattaggtgctatgcgggggaaaagggaaaattctgggccgtagataatttgctcaaatattgtagacaaaatagcgtgtcagatattgattggttgcttatcgatgaagccgctgctattccaatgcctcaattatctgaattaatcggctattttccccgcatattgttgaccacaacggtacagggatatgaaggcacagggcgcggatttttacttaaattttgcgttgggcttcctgatcgtcatgtcctgaacctgacagctcctgtgcgttgggcggaaaatgatccgctggaaaattggttggaaagcgctttactgtttgaggatgcaattcctgtcaacaattctgatcaggcgatcagttatcaggtctatcatcagcagcaatggattaaacagcctgaattactgaggcagttttacggcatattaaccagtgctcactacaaaacttcacctttggatttacggcgtttacttgatgctaaaggcatgcaatttgttgcggctcttggaaataatgccttgatgggggctttgtggatggttgaagagggtgggttgacgcttgagttagcccatgaaatatgggcaggcaggcgtcgtccaagaggaaatttggttgttcaatcgttagctgcccatagcggtttaccgcaggcggcggttttgaaatctcaacggatcagcagagttgctgtacaggctaatcatcgcaggcacggtattgctcagggaatgatcgcgtatcaacgggaaagggcagaaaaacagggggtggattttatttctgttagctttggttataccgcggagctctgggcattgtggcagaaatgtggcttccaattagtgcgaatgggaactcatttagaagccagcagtggttgttatacggcaatggctatttttcccctgagtgaacaagggattttgctggggattcaagctcagcaacagcttgcccgtgatgcatattggctggaattgcagattggatttagcttgcctgttgattaccaaactgaccatcatctcaatcaacatgattggcaggaactgtcaggttttgcatttgctcaccgaccattttctgcttcattaccgtccttgcaacggttgttgctgaacagtgatttgccgttgattgcgctgagaaatcatctccagcaggaaatgcgtgttgagcaatgcatcaccgtattgcagttgagtggatataaggcattaatgcgactctggcggcaagaaaccgcacaggcgttatcaagtctggataagaaacttgccaaagattggcaagagtggactacggctttttttgaggccaatcatcttcatcatcccacttgctattaagatcccgatgaggaggcagttccggtttattgtccagaaattttttaacatccagtcggcgtaactctttaatggcattgagaagaacgccaaccaataaaattaaaataatccaccagtaatcagctaaccattgcattaggttgtctcctgcgcaacatggaggtaattttcaaatatatagggtaagttagcagataaccagtcaataccggcgatgtcatgctgctgccatacatccagtaacatttgctgagtcagcaatttttccaattgcttggcgaatggttggtagctgatatgccacggttcatcagcgacactgccacagttaccgacaaaaggacggtaaaaaccgaaatgagccatattctcggtcaaccaatgagttaatggtgcgaaataaccaccattttcatattcccaaggttcgagtaataacatctggttagccggtagcattgttggatcatagacatccagatcggttccccagtgatgacgactaccaccgggcagggcagaccaacgaagaattgccttacagcgttctccttctgataactgggtgatatccattggctggctgttttcatccaacaccgggcgttcaccacggaattttccattccagatagcttgctgacgttgaaaatcacggaacgtgctggccggttgcagattaattccggccttttcagcggcttgctgcatggaaaaaaaagcattggcggcttctggttgtaatcggtgattgccaaagagggcaatcaagtggccagtcgccagaccggttaacatatttgctgtgatcactggattaactgctccataacacgttgataaatccggctaagttgttgcagatcggcggcgctgacggactcattaactttatgaattgttgagttgagtggccccagttcgacaacttgagcgcccatctgagcgataaatcgtccatcggatgtaccaccactggtagataattcaggttgatagccacaatattggtctattgactggatgacggcattgactaactcacctttggctgttaggaaaggctgacctgccagtatccactcaatcgtgtaattgagattgtgatttttgaggatagtttcaacctgttcacggatttggctgtcagtcagttctgtactgaaacggaaattgaattgaacttgcacattcccagggatcacattgtggctgcctgttcccgcgtggatattggcaatttgcatactggtcgccgggaaaaattcgttcccttcatcccaatgtgtattgaccaatgtctgtaaagcaggaaggacacggtggatagggttatcagctaaatgcggataggcaacgtggccttggataccgtgaacagtgagattcgccgtcagggaacctcgacggccatttttcaccatatcgccaagacggtgctggctagaaggttcacctatcaggcaataatccaatcgttcattgcgggacatcaaggcttcaaccactttaacggtgccgtgggtggctttcgcttcctcgtctgaagtaataagaaaggccagacgtccattatggttgggatgggcggcaacgaaacgttcagccgcaacaatcatggcagctaatgatcctttcatatctgccgcaccccgaccatataacatgccattacggatagtgggctcaaatgggggatattcccactgagattcatcgcccgcagggacgacatcagtgtgtccggcaaaggctaacgtcgggcctatgccgcgataggcccaaaaattgtttgtatcgccaaagggcatccgttcaatggtaaagccaattgtttgcaaatgagcgatcataatatcttggcaacctttatcgtccgggctgatagagggttgtctgatgagttgttgtgcaagttcaatgacagggcaagtcatttcagcgtgcctcagcaaaaaattgctgatattcatccactttataacctaataggtaatcaccttttgcagaaattaatagtggacgtttgataatagcgggttgttccaacatcaacgcttttgctgcgtcagcattattaattgttgctcgttgttgatcggtcagtttacgccaagttgtaccacgggtgttaattaatgattcccaacccagtttgtcaataaatgactgcaaaagtgtggcattgagtccatcaacacgataatcatgaaacagataagtaatttcttgttcctccagccaacgacgggctttttttatcgtgtcacaattcttgatcccatagagagtaaaagcgggttgagaagatttatccaatatcatttaacagatccttaaaaaaatttaaatacctaaacataatgctggaaaatgcctgttttatccagatgatatcctgatttttattatcggagataccaaaacaggagactcaattttattggcctgttctcatagggggtatttgcgacataacattgactacataacaacgataagtaagagccgaccctcggtaataagctcaaggagcggctcggaagaaatattaggctactccatttttcctatgttgcaaatacatgatggttgcagccaggcgggaacgtacattcagtttttttaacaagtttctgatgtgtaccttcactgtctcttcagaaataaataggacatcagcaacttccttattggtcatgccactggaaacttcttttaatacatctaactcacgtttggtcaattcagataaaggatcaacatgtttatgacggttagcgagatgttggtatattttttcactaaatacagtttgtccacgagcagcatggcgaatactgcttaataacgagtctaagtcgctatctttaagtaagtagccattagctcctgcgtcaatggctgcgtaaacatcatttcgatcatctgaaacggataataccagtacataggaattgatcccttttctacggatagatttaatcgtgtccacgcctgaaagaccattcatattgagatctatcataatgacatcaggtttcagcttgcatgcaatatttattgcttcttcaccattgtcagcttccgctgtcacggtaagcgcccgatcgagctctacaatctgtttcaagccatggcgaatgagagggtggtcatcaactatcatcactgaatggttatacattttccttctcccttaaataagtaaagccacgaaatgcagactttgaatttgattaaaaggcagtaatgaatgggtctgccctaaattaaattgctatgaaaaaattttatcaaaaccgattgatttacagaattgatagctctgtaagtccagaaagcacatcctgatataaaaatataaatagcgcaaattagtttgataagtaaaaaaagaagatgagtaattttcacaaaaaacacataacttcacttattttaatgatgttaaaaatcaatatgttaagttggttattattagatttgttttcttttataaaatttattttaattgaatttatattgagagtttttccgagttatagttattttggttactataactttaatgatattgtataaaggataatgtttctgtctttattttcctagattaagtgcctatttcaataggcgtaaataggcgtaattgttgcaggtcgttcttataaataaaagtgagcactgcctaggttcgcttttttgttctttatggcaaagagtggtatgagtggagaaattggctagtgctttttatgagcaaaaaagtgctactttattgataagatgcggtcaatgttatgatttgacacacagtacctattatactgctcctgctcttactccagattgtatataaaggatccgacgatggatgaaaaattaaaacagagtgcattggattttcaccagtttccacaaccagggaaaatcacgattactcccactaagcctctgataactcagcgagatttggccttagcttattcaccaggtgttgctgcgccttgcttggaaattgcagaagatccattagcagcttacaaatatactgcgcgtggcaatcttgtggcagtgatatctaatggtagtgcggttttaggattggggaatattggtgcactggcaggtaagcccgtgatggaaggaaaaggtgtcctgtttaaaaagttctcaggtattgatgtatttgatattgaagttgatgagtctgatcctgacaaattgattgatatcattgcggcactggagccgacgtttggggggattaacctcgaagatatcaaagcaccggaatgtttctatattgagaaaaaactgcgggaaaaaatgaacattccggtattccatgatgaccagcatggcacagcgataatttgtaccgctgctgttttgaatggtttgcggattatgaaaaaagagatttcagcggttcgcttagttgtttctggtgccggagctgcctcaattgcctgtatgaacttgctggttgcgcttgggttgcaacgcaagaatattgtggtatgtgactctaaaggggtgatttatcgtggtcgcgataaaaatatggaagaaactaaagcggcctatgcgattgaagacaatggcagccgcacattaggtgatgttatccctggtgccgatattttcctcggatgttccggccctggcgtgttgactcaagacatggtgaaaatgatggctaaagatccactcatcatggcattggcaaaccctgaaccagaaattttgccacccttggcaaaacaagttcgccctgatgcaatcatttgtactggtcgttctgattatccgaatcaggttaataatgtgctctgtttcccgtttattttccgtggtgcgctggatgttggtgcaacaaccattaacgaggagatgaagctcgcctgtgttcatgcgattgcggatttagcgctagcggaacagagtgaagaagtggcttccgcttatgatgatcaggatctgttttttggcccggagtatattattcctaaaccatttgatccgcgcctgattgtgaaaattgccccggcagttgccaaagcagcaatggattccggcgtggcaacccgcccgattaaagactttggcgcatatattgagaagctgaatgagtttgtctataaaacaaacttgtttatgaaacctattttttctcaggctaagaaagcgaaaaagcgtatcgttttggccgaaggggaagaagtacgtgtattgcatgcgactcaggagctgatctctcttgggttggcttacccgattctaattggtcgccctagtgttatcgaaatgcgtatccagaaactgggattgcatattgaagcgggtaaagattttgaagtcgtcaataatgagaatgatccgcgcttcaaaaaatactggcaggaatatcatcacattatgaaacgtcggggtgtttctgctgaacaagctcgccgggcagttatcggtaatcccaccctgattggggcgattatggtactgcgtggtgaggctgatggcctgatttgtggtactgttggcagttacagtgaacattacgatgtcgtgagaaatgtatttggtttccgtgatggggttcatactgctggtgccatgaatgcattgatgttgccaagtggtaatacttttattgcggatacttatgtcaataatgatccaacgcctgaacaattggcagagattacccttatggcttcagagactatccgccgtttcggtattgaaccaaaagttgcgctgctttctcattcaagttttggttccacagattgcctctcagcgcagaagatgcgccagacgctggaattggtgaataaaatgtcaccttcacttgaaattgatggtgaaatgcatggtgatgccgcattggttgaaagtattcgccgtgacatcatgccagatagcccattgaaaggggctgccaatctgttaattatgccgaatatggaatctgcccgtatcagttataacttgctacgtgtcaccagttctgaaggcgttaccgttggcccagttctgatgggggttgccaaaccgatacacattctgacaccaatttcttctgtacgtcgtatcgttaatatggtcgctctggcggcagttgaagcacaaactcatccgctgtaatacccatcgcccctgtttcctgtaggcaggggcggtttgttgtaaacgattcttattatctacatgatgggcaaaacattaataatatggatatggacatgatgaaatttctcacgactgtaaaatcttttctgattatctgtggcttactgatcttatctggatgtgtatctgtacaccaaaaaaccgctctccaggcactttcaccggaactgactcaacaaggggctattatcgatcttaaaaccggtcacgccctgacccctgatgaattgatcaatcggctggcatcacatcaacgggtaattgtgggtgaaaaacatgataatccatatcatcatcagatagagatttggttggttcagcaacttccgcttaaaagagaacagggttcggtcctgctagagatgattaatcctgatcagcagcaaaaagtgaataaggttaagagttggttgcaaactcagcctatcgtacgtgaaagccgcataaaagagcttctggcatggcaagatgggtggcggtgggagttgtatggtggattggtcatggagcttatgcatcaaccttatccgttgctgtctgcaaacttagatcgcagtgaaattaaagcggcttatcgtaaccctccggtcctccaggggaatatttctgttgctgaaaatgtcaaggctcagattaaagaggtgatcaaagatgttcacggtggtgaaataacggagcaacagttatctgccatgacaactattcagcaaatgcgggatcgcagaatggcggaacagttacttaaagcgccggctcctgccacactgattgcgggtggatatcatgcaacaaaagtaataggtgttcctctgcatgttaaagaattatcgccccaagaggactttgttgtgttgatcatggctgagaaaagcaatgtactggatagccaatatgctgattatgtctggtatacacccgtaaaaaaaccatagatattttaaacaaatggtggtcttttctctgtatataagaggtcttggcacagggatgtgctcaagttaacgataaagataaaaataattttcattagcatatgaaattaattatcattactaaatgataattaaaattatgcgctatcatccatgttgacgctgacacactcggcctttcaaacgggtcattttaaaaaagggctcgtttctgctattgctgttcacctcattttggtcggctggattatctcccagccagaagaaattgctgttggtgaattgatgccaccaccggcggtgatgatggagctttcattgttgacagaagcgacacatcaggtacaaaaacaacctattggtcttgaacaacaactttctgttgccagtcgacagcaggaaagtgaggttaatgagattaagacgcctgagcttatgaaagatgaacaggcacagatcttggtacataaacctaaaaaacagaaaaagcaccacgaagagattaaaaaaacacccccggtgaaacgccagcaggtagaagaacaagagagtgaaaaatctcaaagtagcgcggctatggcaagcagtactgccacttctacgaatctgacttcgcgggttgccgctgcttatgacagtgattcaaaggccgttgctgatgcggatgcgttatggcgagcggaagttgtcgggcatttgaaccgctataaacgttatccagaggatgcacagagaagaaaccgcacgggtcgtcctacagtcagattcactattgataaacagggctatgttactaacagtgacttagttcgtcgttctggaacccattctttagaccgggaagcgaagcaaattctggcaagggcgcagccgttgccagttcctcccattgccgttttaaacggtaatgaaattacgatagaaattccgattgattttagtttaactaattaatacttttgaacgacttaaggacagcaaatatgttaaggcagcaagcgtggtttgccctgaaaactaaagggctgttattgatgtttttattaagcggctggttgaatcctgtcgccgcagaggaagaaattatgccaccaaaggcaatgaaacaaccacaccatataactacccacggtgatactcgtatagatgattattactggatgcgggacgataatcgtaaagatcaaaaagtcattgattatctgacagccgaaaataaatataccgagcagatgctaaaacccggtgaacagctacgtgatacgttatacgaagaaatggttggcaggatgaagcaggatgatcaatcggtaccctatacttataatgggtatatatatcggacaacctatgaaacgggcaaagattttccgatttatcagcgtaaaccggttgatggctcatcagattggcagatactggtcgatggtaatgaaagggctaaagggcacgaatattaccaactgagtaattttgccatctctctggataataaacgtatggcgattgctgaagatacgcagggacgccgtaattatcagatctcttttaaagatattgctgataaacagtggaataatgatgtaataaaaaatacttctggcaacatggtttgggctaacgacaacaatacgttgttttatgtgcgcaggcattcacaaacgttactgccatatcaggtatttcgtcaccaatatggtagcaataccagtgaagatcataaaatatatcaggaagaagatgagcgtttttatttaagtatatctaagagcacttcccgcgattatattatgttggcgataaccagtaattcgacttccgaatatttgctgattgatgcgaataaaccacaagctgagcttcaactattctctcctcgtcaggaaggcagagagtattatattgaccatttccgcgatcatttctacatccgttcgaatcatgagaatgaaacttatgggctttatcagacggatgccatcaatataccgtggaaaatagtcattgctccgcggcaagatagtgatcttgaagatttcgatctgtttaatgactggttagtcgtacaggagcgaacaaaaggattaccgacaattcgtcagattaattggcagacacagcaagaaaaacagattaagtttgatgatccaagttatatggcatggattgattacaaccctgaacccaatactgattttgtccgttatggttattcatccatgacgacaccaagctcaacattccaatggaatatgaaaacaggtgagcgggaattacttaagcagcaggaagtaaaaggttttgataaacatcattatgagagccagcgtatttgggtgaaggcccgtgatggtgttgaagttccggtatctctggtatatcgtaaatcactgtttaaaaaaggccataacccaatactgatttatggatatggggcttatggtatcagtatggacccttcatttagctcaccgcgattgagtttattagatcgaggctttgtttacgcattagtacatgtgcgtggtggcggtgaattgggtaagaaatggtatttacaaggtaaagtcgaaaataaggaaaatagttttaatgactttattgatgtgactaaggcactgattgcgcaaaaatatggtgacagcaaacgaatttatgcgatggggggcagcgcgggtggtttgttgatgggcgctgtgattaatcaggcaccggaattatatcgcggtgtggttgctcaggttccatttgttgatgccgtgacaaccatgcttgacccttctattccgctgaccgtaggagaatatgaagagtggggtaatcctgaaaataaagaggattatttccggattaaatcatatagtccgtatgacaatataaaacatcaacgttatccgaacttattggttacgagtggattttatgattcacaagtgcaatattgggaacccactaaatgggtggcaaaattacgggatatgaaggaagataactctattttgttattagaaaccaatatgagtgccgggcatggtggtaaatctggccgatttagtcgattaaaagatactgcactggattacagttttattttgatgctggatgatgctaaaaagtattttccgcaattaaaagataactgaaataaattataaataatataaatttgttatttaaagcactgataataatttatcagtgctaaacatttttattttctaaagacgggtatgtgagcaaatattgatttgtatgcatttgggatgattgaaatgaaaataatgacaaagatagcaggggccggtgtggttttaattgggcttcaagggcttgcttatggtgaggaaaagcaagagagaaaatcagataaggtgatgaaattcggtagccttaaagtttctggttcacaggatgatgcggaagtgagggcaatggaaaggcccggttcatacagttctaaaggagaagatacaaaacttcaatcaacggatagtatattacgcagtatgcctgggacttatacgcaaatagatccggggcagggaacggtgagtgtaaatattcgtggattaagtggatttggtcgagtaaatatgatggttgatggtgttagccaaagtttttatggcacatctccgacgagtcctgctcacgggactacttataaccaattcggtacaatcattgatcctaattttattgtaggagttgatgtcaaccgtggtcaatctgatggctcaagtagtgttaatgcattagtaggtagcgctaattttcgcacaattggtgtagatgatgtgatatttgcagggaattcattgggagtacgcacaaagacagcttatggaaataatggtattggctataatggcatgatagcggttgcgggtaaaacccccgctttcagttctgaaggttcaataggcgctatgttggctgtcagcgggcattcaattgatgcacattataagaatggcgacggagtattaagcgatgagtttgttacagataaatcgtttaagcaaaaacctaattctcaattaatgaaaataaaaattgaacccaatgaatttcatgatatggaactaagtggccgtaactatcataataaatttacccgccgtcatattgatagtcgggatatttatttaaaatacaattacactccatttagtgaatgggttgatataaaattattggtcagtaccagtgagagtcgtcaacgctatgaaggtgattcactttttaaattgctcaatagtaatgcaaaaaataaatcagatgcaatagatatcagtaatattagtcgtttcgactacggtgatacaaattttgagttaacatttggcagtaagttaatggaaaccgaatatagcagaacaacgaatagtgtgtattctggtcgaggtaaagatgaaaaagaaaagcaagaatataacaagaaagacagtgaagtaaaagaaaataatgttttcgcgccaagtggtaaacaagatattgccagtatttatggtggattgaaaataaatcgtggaatttatcaggcagatattacgtttaattatatggattaccgtgtcaaaggctataaaccggcttgtgatctgcgaattccttgttttccccagggagcaaccgaattggatttgaaagaacatgggtttaatccaggtattttactatcagcagaaattattcctgagttccaaccattcgtcagttatgcccgttcaatgagagcacccaatattcaggagactttttatagtaatgaaggtggtgggtccatgaacccatttctgaaaggagaatcatcagacacttatcaaattggctttaacagtttccgcccagatttaattgtaaagggagatactttccgtctgaaagcggcctggtatcatactaaagtaaaaaattatattctcagtgatatctggcttatatgtggcaataggaaaaaatgtaaagccgatagttcgacagattacaatgaagtcgatcctaacatcaaaatgtatatctaccacaatagcttgactccggtaaaaatacacggatatgaaattgctgctgattatgatgcgggtatgttttatagcaaattggcttatagttggcaaaaaacgcgtcaaccaacttcggccgctaccgcgcattttggtgcggagccgttgtcacaactacctgatagctttatgacgttggataccggtgtttgtttatttaatgagaaattccgtgttggtgcgattgttaaatataccggtgattctcataggctggacccagatcaatataattttgatgaagatgggagggttgtgcagcaaaaagaacctaaaatcccaacgatagtcgatctttatagcgattatcagataaatcacaatgtgctgctgaaattctcagtacagaatttggcaaataaaaattattctgaagcacttaatcgtgcaaattcttctccattaatgactgagcaaacttcggctatgcaaactgcccggggccggacttatattgtcggcgcagaaattcgtttctgattatacccgttatctttcaagttgccgtcgcgatgcatcttgaaatccatagggtgtataggaaaaataagtggcaaaggaatgccactatttcagatttgcagatcgttttttccgttcttttttgattttcaacacctcactttcaatccaaccatcttgtaaacgggtattcaagacatcaccaacatctacctgtttggtttgtttcagtaattttccatccgatgtttgactgatgctgtaaccacgggccagtgttgccagagggctaacggcttccatccgtgaacaggaaacggcaaatttttctctggaacggctgatttgccgttcaattgcctgtcttaaccgaaaatcttgttgctgaatttgttgactatagtggtggatttgctggctaggttcagcgtaccagagccgttgttgtaatttttcataagccaggctgttttgctttaagtaccgttgcaagctgtcagtgagtcgctggcgtaaattgaccagtaagttttgctgacgcgctagtcgtagatgaggatgttgttgctgtaaacgatgagataacagactgaaaatatgttgtttctgggcaaagaaataatccattgccatttccaaccgctgttgttgcgactgaatttgacgtaataattcgagctgattacggctaactaactcagcagccgctgatggcgttggggcgcgtaaatctgccacaaaatcagcaatggtgacatctgtttcatgaccgaccgcactgactatcggaatatcactgtgaaaaatggctctggcgacacgttcatcgttgaaactccataagtcttccagcgagccaccaccgcgcccaacaatcaatacatcacactcacgacgctcattagctaattcaatagcccggataatctgtaatggtgcttctgcgccctgaaccgatgttggataaatgatgatgggtaatgatggatcacgacgctttaaaatattcaaaatatcatgcagggctgcgccactggttgaagtaatgacaccaagctgttgagcaggggatggcaggggcttcttgtggctttggtcaaataatccttcggcatcaagtttttgtttcaataattcaaactgttgctgtaacaggccatcaccagcgggttgcatattttcaacaataagctggtaatctcctcttggttcataaagcgtgattatcgcgcgaaccaaaacttgctgaccattttgtggcctgaatgttacccgttgattgctactgcgaaacattgccgcccgcacttgggcacgctcatctttcagcgtgaaataccagtgcccggaggaggggtgagaaaaattggatatctcagcgcttagccaaattctgcccatttccatttcgagtagttgtcgaaccgtctgattaagacgactgacagaaaaaattccagtattaaaaggtagtgacatgtgagaaagatcaaatttcaaaacaataacttaatatgctgatactaacgttcatcataaagtaagcaagaaattttttaataaaatgctggaggcaaccgattacgttctgtataatgccacggcaatattttataccttaaattttcagcagcttggtgagatattgcttatgttacgaattaaaaaagaagctttaacctttgatgatgttctgttagttcctgcccactctactgttttacctaacactgctgacctgtctactcaactgacttcctccatttgtctgaaagttcctatgttatctgccgctatggataccgtcaccgaatccggtttggctatcgcgttggctcaggaaggtggaatgggttttatccataaaaatatgtccattgagcgtcaggcagaagaagttagccgagtcaaaaaacatgagagtggtgttgtgacagatcccgtcacagtggcacctgaaacaacgctgcgtgaagttaaagaattgacagaacgtaatggttttgcgggttatccggttgtcactgaaggaaatgagttggttggtattattactggccgtgatgtacgtttcgttaccgatttggatcagcctgttactgcggtaatgacgcctaaagcgcgtctggtgacagtaaaagaaggtgaagcccgtgaagttgtgttgcagaaaatgcacgaaaaacgtgttgaaaaagcgctggtagttgatgaaaactttcatctgcttggcatgatcacggttaaagattttcagaaagcagaacgtaaaccaaacgcctgtaaggatgcacgtggtcgtttacgtgttggtgccgcggttggtgccggtgctggcaatgaagcgcgtattgatgcattggttgctgctggtattgatgttctgctgattgattcctcgcatggtcattctgaaggggtgttgcaacgtatccgtgaaacccgtgctaagtacccgaatctacaaattattggtggtaacgtggcgactggagaaggcgcaaaagcgctggtagcggctggcgtcaatgcggttaaagtcggtattggtcccggttctatctgtactacccgtattgttactggtgtaggggtaccacaaattaccgctatctctgatgccgttgaagcgctggaaggcaccggcattccagttattgctgatggtggtattcgtttctctggcgatattgccaaagccatcgccgcgggagcgtcgtgtgttatggtgggctctatgttggcagggacagaagaatcaccaggagaaattgagctctaccaaggacgttcatttaaatcttatcgtggtatgggatcattgggggcgatgtccaaaggctcttctgatcgatatttccaaactgataatgccgcagacaaactggtgccggaaggtattgaaggccgtgttgcctataaaggcttgctgaaaaacattgtccatcagcaaatgggaggcttgcgttcctgtatggggctgactggctgtgcaactattgatgagttgagaaccaaagcagaatttgttcgcatcagtaatgccggtattcaggaaagccacgttcacgatgtcactatcatcaaagagtctccaaactaccggttaggtttgtaatccatatttattgtggcccatataagggccacttatctttatttgttacttgtttttttggaattcaccgcacatgacaactaatatccatcagcaccgcattcttatccttgattttggttcgcaatatactcaattgattgctcgccgtatccgtgaaatcggggtttattgtgaactttgggcatgggatgtcactgaagagcaaatccgcgaatttaacccaagcggcattattctttccggtggcccggaaagtaccacagcacaaggaagtccacgtgctcctgaatatgttttcaacgctggcgttccggttctgggggtctgctatggcatgcaaacgatgtcagtacagtttggtggtaaggtagaagattctactgagcgtgaatttgggtatgctcaggttgagattaaagcggaaagtgcattattccgtgggatccaagattcattaaatgagcaaggtaaaccatcattggatgtatggatgagtcacggtgataaagttactgcaattcccgaggactttatcactatcgccagcactgatacctgtccatttgccatcatagcaaatgaagaaaaacgtttttatggcgtgcaattccacccggaagtcactcatacccatcagggacagcgtatattggaacgttttgtactggatgtatgccaatgtgaagcgttgtggacgcctgcttctattatcgaagataccgttgtacgcctgcgtgaacaggttggtgaggatcacgttattttggggctgtccggtggtgttgattcctctgtcactgcattgttactgcatcgtgcaattggtaaccgcctgacctgtgtatttgttgataatggtttactgcgtttgaatgaagccactcaagtgatggaaatgtttgccggcaaatttggactgaatattgttcatgttcccgcagaagatcgcttcctgactgcactggctggcattaatgatccggaagagaagcgtaaaacaattggccgtgtgtttgttgaagtctttgatgaagaggcgagcaaacaggctcaggttaaatggctggcacaaggcactatttacccagatgttatcgaatcagcggcatctgcgaccggcaaagcacacgttatcaaatctcatcataacgtaggtggtttgccggaagagatgaaattgggtctggtggaaccgctgaaagagttgttcaaagatgaagtacgtaaaattggtttggaattgggattgccttatgacatgttgaaccgtcatccattcccaggcccaggtttgggcgttcgtgtactgggtgaagtgaagaaagagtactgcgatctgttacggcaggctgatgctattttcatcgaagagctgcacaaagctgatttgtacaataaagtcagtcaggcgtttaccgtattcttgccagttcgctccgtgggtgtgatgggggatggtcgtaaatatgactgggttgtttcgttgcgagcagtagaaacgattgattttatgaccgcacattgggcgcatttaccatacgatttcctaggccgggtttctaaccggatcatcaatgaagtcaatgggatatcaagagttgtctatgatgtcagcggcaaaccacctgcgactattgagtgggaatgatcccgaatccggcatagactggcactaaagtgttgtggcggctggatcgactcgggcgtagcctcgccgatctgatgcagatcgtggctgaccttgagcagcgcagcgggcagattggttttccatgtgttcgcggcactggccgagttcgagcgcggcttaatccgggagcggacgcaggccgggcctgtggctgcaaaccgaagctggacgaccagcaggtgcgcgagatcaaagccctgttgcgcgatcccgatattcaggtggccgaggtggcccgccgttatggcgtgtcccgaaccacactttacaagcatgtcggcgtcatcacgccgcgccaatgaggatttgggatgacccaacaactagacgccgcaaacagcgtgcgcagcaaggttactcctagagctgttgcagtgcctgtatgtcccgtcacggcagcgactgaggctttggcgacagagggcgggctcgaagcccgaggggccattttcacgcgctttgaggtggtggatttcattctcgacttggttggttacacagaggatcaaccgcttcacgaaaagcggcttttggagccgtcatttggtggtggcgactttctgttgccgatcattgagcggctactgagtgcatggcgggcagcaaggccgagcggttccgcgctcgacgaactaaccgatgcaatccgggcggtggaattgcaccacgagacctttaagagcaccaaagctgccgttgtcacactgctcaggcggcaagggatcgctgcgaatgctgcggtcacgttggctagttactggctgtcgcaaggcgatttcctgctggcaccgctggaggggcaatttgattttgtggttggcaacccaccctatgttcgtcaggagttgattccggcaccgctgcttgcagaatatcgtagtcgttacctgacgatgtatgaccgggcagatatctacattcccttcattgagcggtctctgtcggttttgtcggatggtggcagcctaggcttcatctgcgctgatcgctggatgaaaaaccgctatggcgggccactgcgcagcctcgtagccgagcggttccacctgaaagtctatgtcgacatggtggatacacctgccttccactccgatgtgattgcttacccagcaatcactatcatcagccgtgaagtgccgaggccaacgcgcatcgcttaccgcccggctattgaccctgcgacgctgaccgcattggcaggtttgctcaaagcaccctcgctgccgaaggaagtcggcccggcgcgtgaacttgcccaagtgaccaacggttcggagccgtggttgctggagtcattcgaccagatggcggttattcgccgtctggagggggactttcccctgctggaagaggcagggtgtaaggtcgggatcggtgttgcgactggcgcggacaaagcatttatcggggatttcgacgcgcttaatgttgagccagaccggaaggtgccgctggtaacaaccaaagacatcatgaccggcgaagtggagtggcgcggtctgggtgttatcaacccctttgctgagcagggcggactggtcgatcttgacgagtatccccgtctgcggcgctaccttgaggctcgacgagaggtgatcgctgggcgtcactgtgcgcagaaagctccggccaactggtatcgcacaattgaccgcatcacgccgtcgttggctgcgaggccaaagctcctgattccagatatcaagggacaggcgcatatcgtctatgaaaatggtgaactgtatcctcaccacaacctctactacgtcacgtcagacgactgggatttacgggccttgcaggctgtcctgctatccgcggtcactcgtctgtttgtggcgacctattcaacgaaaatgcggggtggattcctacgcttccaagctcagtacctgcgccgcattcgcattccgcactgggctgaagtgtcagaaccgctgcgccgtgagttagccgaggctgctatcaaacgggacttgcaagcttgcaaccgggctgtgttcaggctctacgacttaagccaagaagaacgatctgccctcgggggaaatggagaataaatggcgctcgatctcgtcgactacgaacagaaagcccgcgaagccgtgaaggcgttttggggcaaccgcgaagcagcaagacaaaaacaaatagagtcgggcaaggccgaccaaggtgaacgtgccggagtcaccgctggcaagaacatggacgggttcttggctttggtgctcgacatcatcaaggccaatgggctagcccatgctgagattcaccagaaccgggcgatgctgaccctgcccggatattttcgtccgactaaactgtgggatcttttggtgctctacaagggacaattaatcgcagccatcgaactgaaaagccaagtaggcccctcgttcggaaacaactttaataatcgaactgaggaagcaatcgggacggctcatgatttatggacagccttccgtgaagaagctttcggcaagcaaccgcgtccatttgtagggtggatgatgatggttgaggatgcgtcggagtctcgtaaatccgtccgcgactcgtcgccacactttcctgtgttcgaggaattcaagggcgcgtcatatctcaagcggtatgacctgctgtgtcagcgactggtgcaggagcagctttacactaccgctgccgtcatcgcggcggagcgcagtgcagtgaataccggcgatttcgcggagctgtcttcaatgaccagcctcaagacgttcgtggcagctttagcaggccacgttgcggcagaagcggcacgattgggctgagataggagcacctatgtccgatcttagcggaagtgaacgtcggaaactggaaaggctgctcggaatgagcggcgggtacgtcctcaatttttccgaccgaaccttcggcgactttttcgtcgaataccgggtggaaattgatgctgaatgctaccgagcgcgcggcacgtcgaaggctaaccgtatgcgcaccttctgggagttggaggcgaactatgtggtgggtcgagttatcggcggtttggtcgactacgccagcgaaaagcagtgctttggtgacagcaacccagtgctgattgacgattgccggaagatcgctcagcggcttctcagtgaccagccggttgctgagctagatgcgctgatagccatcgcggatgaacgagatttcgaggtggtggcggagcacgttcgcgaagctatcgagaaaaatcaacctgagggcgggttagatcggcttcatacgttcgtcaacaagtttatccgtgtaacatgtgcgcctcacggcatcacgatcacccgtggcaaaccgttgcatagcgtctttggcgagtatgtgaaggcgttacgtgatggaggtcatcttgagtcagcgatgaccgagcgtatcttaaagtccagcatctcggtgcttgaagcctttaacgatgtgcggaacaacaagagcttagctcacgacaacccaatcctgaattatgaggaaagcctgttgatcttcaatcacgttgcggcctcggttcggtttatcaagtcgctagaggcgaggataaaagctaaagtgacacaggcgaaacacggtggttgggacgaaagtatccttttctagccgcgatggcatcgcacggaacttggctaccaaaccgtgcactttgaaaggagggtggcaccaaatgaaagatagatcgcatgatgaggtcatggccgagcacttccgcgctgatcgacttatgcagcggagctgcttgccgaagtccgtcgcgacggtgacccggccgaactggccattctgttgcggcagatggcctcggagcaggatgcgaggcaagatgcaaccgatgtagggcgcaaactaaccccctgattagaacgtggtattttcatggtcttgtgagttcctgttattgcaatgtgctgatttatatgtatttttattcgtaatttataagagtggaaagttcccagagtctatagacatcgattgaagcctaaactaaaaacaccaataaaactaaagcgttttttggtgtttttatttatggtatgcactatggatattcactttaggttgctgttaagacttggttttttcagctttattttgtctagaatctgggctggatttaatgacaacaaaccggccatgtgcacaaattccacgacatctagtcttctttcaccattctcaactttggctataaatgattgaggacggccaaatgcttgtgccaatttttcctgtgtaatgcctttttctaggcgtgtttcgcgtaataatcggataacacgctggtattcttctgagtaaattgagctcatccgttttgccttaataaaaaatcctaagatagaatatctctcatttgcaaaaatatccaaaataagaaaaagagaaactttactggctaacttatcagaaaactcaggtttgaagcttttatggcggtaataaaaacataaaataaagacattaaactggttttataattagctcacagttggaaagaacaacatgataaatgaacagtttactcgttgggattcagcagaatacctgaaaaccaaagtagatatggctgcgtatttgaatgcctgtattgaagaagcgggtgatgatcctgcctttattgtgcgtgcgttaggtacaattgcgcgtgcgcatggtatgactcaggtggcaaaagatgccggtctgtctcgtgagagtttatatcgggcgttatctggtgacggagaccctgagtttggcactattctgaaagtcgttaaagcattaggtttgaaactccatgtgacagaggaataatattgatcatagtaatgaataacctgctatttgcccgcttgttgtggaaaggggaaaactaaaaggagtgaactatactggttacagaacaggttcactcactactttagggatgttgcagttaacgctatatgcaaagccacagactcatagagagagggactgttatttgtattagtgtctagcgatactcccacttatatttaagctcaatgaatttgctatcagaacctaagctggcatcagctttttccattttttcaagccatttctcaaaatcataaggccatttctttacatcctcaggtaaagtattggataaaaccgctattgtttctttagggaattttttaactattgcttcgtttttaatataatacatcaaggatgcaccattgttcgtgcatgttaagaaaggcataacaatatctactaactttggaaacatagtttcttgagaaaataaaagacgggaaatattttctgttgtttctggtgattttattgccttttgacgaggccaaacatgggtaaaaaattgaattattaaatctcgccattgtaaaaaaaatttattatcaggttcatcttttgaagaaagcctccatagcaaccataggattttatggcgtaacttctcatcaccataaaaaagagcatctctaaattcagaatcggaaataaattgctttgatttttcatacaatttactagcccaaccaaataataaaaaatttgctactgaatttgtttgatgctcagagtgaaatgacacgctattacgtaaaaagcctagtaaaaatggtttcaaagtatcatacaactgagagcttctggggtaggtttctccccagaaatagccattccagaatgcttccttctcgtctggctcaccatttttgataacatgtaacaaattattattagtccacactggaatatggtgatgtaaccaaattagttgtttgactaaatatactaaagcgtatttcctggaatcacctgataaagtattcaaacgttcaatattagaaagccattgttgagataatttgtcttctaaatggaaattttttagacgagggtctttaaacaatatatgtgcgattgatgacatgggagagttttcagcttctggaatccaatcgcgccgttctcttttaatttcgatggtagtaataggagttggcattatccctatagtgtcaataagatgctttaataatgtgtcatagatgtcaatatctatagaagctaacttttcatttatagacgaaatccaacataaaacaggatcaataattgagactaaatctttgttagaataagacatcatttgtcttgcaataaaataaatgaacttttttttatcattttttcgcgattcagacgacaggaacttttcccatatttctttaggatactcttttttctctttagcccaatgtcttagtgcagaaaaagcccttaatggatattgctttgataatcctttaaaagggtcgttcctctctgaaacgatccgttcaacagaattaaattctaaggcttgcggaataatatcccttataggaatacccaataattcattacagttagattcaatacttatatacccacctttgggttccatagaagtaatggcattatctgctagcccaatttcccattcaggatatatattttgaagttctctaacccgctcttttatatcaatataaaaatgacagcctttattcttaagccagaatattcgatttaggatactatcagcttgccatttatcgcctagattactatctatacatgcaggaatgagcctaccttttaataaacgctcaacaatttcaatgcactcattctctcttaattcatcccatctatctgcaagtgttagcatcaggtctctttgattatgttcattccaaaattcatcatcgcttaatgcattgataagtgggtaaaaatcggaagaggggacgatttcaggcttacatgcaatccatatacgaagttgtgaaaatataggattatttctgggccaactcaagaattcgtttcttgcttcatacaggtctagttgaattaacctttcatacaaatgtacgtatcgcaatacatatccttccagcccgacatctcttatacttaaacctagttctatactgctgtcctctctaattggtgataacaaacgcactgagtgaggtgtccttttctctgattctaacgaataagcgtattcaatatttttcctcagttctggaatcactttaattagtaaagaatttggaatattaattgcatcaaaatggtgtttttctatatatcgtacatctaattccagaaatttacgaagctcagttatcgtattaattggagggagaaggctatttattttgctagatacagctaaatatgggcgcgtcagttttatatattgacggaacgtcacttcattccaaccgtatgttttaatttcgtgtgatagactataccagtggcgttcaaaatcttcatctttatattcatattgccacgactcaattaggtattgccagattttgcgaatttcactatctactttattctctttgagtttctgtaaaatataatgttggatagctggtttaagataattttgtttcgttgcccaccatatggctgtcggctgatgagctacttttgcaagccagacaccaagaaaccattgtctattagataactttgagtttccatattcagatgttgttctgaatgaagcaaaatgtttcttgtttaactctttaatatcatcatgatgtggttgaaacgcatcccatgcctttttagctatttctttatctatatcttcattattcttttgataaatatcaggtgttttatcaaagtctaaaccgtataaagtgaaaggttcaggggaagtgttacatctcaaaggccagtggttattagagtgtgtagcaagtcgtatattacgatcaaaaacacataaccattctgcaggaggtggattatcaataagtgcaaacttcttcataccttttgaagtagatacaatatgagcaacttgtccacgttcgtggggtaagagattggttgggccacgtcgagctatctctatagtttcgctataccattgctctacgttcttcgcttttttcgcccaagcatctaatgtctcccaaagagcagtatgtttatcttcaggactgtaagcaattgcttgaacacctttatgttcccatagttttcttgcttcttctatggttccagattgaaatgcatatacattttttgcttttatcagatttttattaagtccttcgagcaaatattgcattgggggatcatttgcagaatagccaataaatacaactgtatatttagaaaaaatctctcgaataaagttcgttgcccaaccatcagaaagataggctcttccaaactctgaacctgataaaacaaaaccattgccttctgcaccaatgtaatcggaattagatcttccatgaagatataccagtccatcaattaattcatttttggataaatctggtaaatttggaggtagaaaacacggaatctctgtcaaggaacaatcattgaataaacgatcaaagttagttgtaattaattgcactcgaccttcggatgtagtagcaaggtctaacaataatttatgtgcagatgtgtcaactgtgtccgatggtttcagtacttgagctacagttttttcaattaaattcgtttcgaactcttgttctaataagctaaatatccgatctgttgaaataagagttgatgcataagaaggtaatgcaacttcatttccttccttatcttttaatcctttattcaaaaaatcataaagttgacgagcttggctatcattagtcgttccgagtaaatcaataactttttgcgccaattgaaaaaaattaggaagcttagctttggcaagcgatatccctgcgccacaaaagaaaaccacgtgcccttgatcacgggcaagtaataattcatcaggaataagtggtccatcttgaataaaccgcaattttctctccttatattgaaaataatttcattatacttttttatcatttaccttagaataaggcaacttttttctatcccatgtttgtgtttctgatgttgttcataaagcgttaatatttctgaatcaggcaattgataatgtaatggattgataccaccttgattagattgttttgctattttagggtgttttccgatgactattttgctcatatatcgtctctttccctgtagataatatgatttcatcattgaattgttttaataccgtagcaaagtctgcacggactttatccagatcatctgctagagtttcaacgtcacttttctgtgagataagttcacaatagtttgtgttgggcataatatcgaatttcggtgaaattgatcttaatttattaaaatattgtatgaaaatggtcattatattatctgcattattagctgtttctattagttaaatgacttattaacaatgatattttattttgattgaagaatcatacccgataaatatatttatgctatagaaatattgcgggccgtttcaaaaaaaggactgaaaataatggagtataatttcattcaagataatgattagttgtttatatagaattattaattaacatgatttacgacgataagtatcagaatatgctatagtgctggctggttttcgctgatatttttggaatcttatgtcttaccaatgtcccttatgtcatcaatctttattgctcattcgacagcaatggcgctgtgagaataatcatcagtttgattgtgctaaagaagggtatgttaatctgatgcccgttcagcataaaaggtccaaggaaccgggggatagcccggagatgatgcaatcaagaagagtgtttttggattcagggcattatcaaccattacaacgacgggtttcggaattactggaaaagtatctgccagaaaatgcggagagtttgttggatataggatgcggtgaaggttattacactgctgcggttgaagcacagttaagcaagagacgtaattttaaaatctatgggttagatgttgctaagattgcggttcgttatggcgctaagcgctatccggttgttagcttttgtgttgcgtcgagccatcgcttgccatttgccgatcaatcgcttgccggggtgttaagaatttatgcgccttgtaaagcggaagagttggcaagggtagttaagccacagggaattgttttgacagtcactcccggtcctcgccatctttatcagctcaaggagttgatttatcaaaatattcatcttcatccattgaaggcggaactgttggaaggatttgaattgataaccgatgaatcgttatcttatccaatgaaattagatggcctgcaagcgtatcatttattacagatgaccccatttgcctggcaagcaacagaagatgtgaaaaataagttggcagatagagcgctgtttgaatgtgaaactgattttatattgcgggtctatcaacgccttaattgatcaagatttcagcccaaaatatataccctatggctttacaggtgtaaatattttgggctggcggcgttattttgcgtacataaataattctagatgttcaaacaagatattgaagccaattgcaattagaatcagcccaccaataagttcagcgcgtttgcctaaccgtgggccaatataacggccaattaacatacccaatgttgccataatcattgtcatcattccgatagccatcgcagtatgtacgatattgacttcaaggaacgctaacccaataccaattgccattgcatccaggctggtggcaatggctgttgttatcaacacaattgaattatggcggcagggtgactcacactttttttcctgctttgttttgaaactctctgtaatcattctacaacccagaatgaataacagagtgaaagcaacccagtgatcccactctataatatattggctggcataaagccctagagaccagccaatcaatggggtacaggcttctgccaaaccaaatattaaaccggtacggattgcttcacgaaaatgcggtctatgtagtgcggcccctttacaaattgaagcagcaaaggcatccattgaaagtgctaaagctaggatgagggttgcgtacatattcattaatatagcctcggttgggtgtttccatatacatataacccacccccaaccaatgatggtgctatatgcaatggtcttgccaaccgaattaatagctatctcattagactatttcatttgctatttttagcaacaataatgcctgttaagatagcaataaggttacccgcaccacgtttattttgtaacgagcgtgttgatacgggcttttcagaaaaattaactaaatcgtttctctgaaacaggctactccccatgacaatttaaaagatagcacaataattcaaaaagggaaaataatattatttttagggttaaggtatgatattgataataattatcattatctgttttatggggaaaataaaagtcagcgtaaggctgactgtttattgtctatttttttatttattattttttcttatctatctgttttcgatgagaaatttataaattctttctaaatcatcaatttggcttactgatatatataatttcttgttttctaaaccaataaccagaatgccatcttcagataaattcatggtttttatccggctataggaaataaaggtatttgcatagaagaaaccgttatttttaaaaaataatttaggcgaacgtatataggcaatataaatagtcaccaagatagtaaacagcaataaatatgtggttaaacggctaccataaacagtaatattattataaacaacaataagtatcaggataataaagatgagtgcatcaattttatgttttctttttagctttatttgtaagtgagttttcccttttagaaaattcaccacgaattcatcataaacagcaaaagctagcatgagtacgattaaaccagttaatgctatatcattaaggttcattccttatccctatccctgcattgttataaaaaagaaaatatggggaggagtgcctccccgaatgatattgtactaaaagaccattgtactaaaagatcattgtactaaaagatcattgtactagagaccaaggaaaccaaatctggcaccaataatccccagaataaagaagccaataatgatccacagcgcattgactttatgtcgtaataaccacatacaagcaaatgtcagtaaaagtggtaccaagcctggcatcaattgatcgaggatattttgaaccgtggttattgtcttttcacctgtctgttggttaggaatttctgatacaaccagcgggatattgactttcgtccatttattaactaacgcccccataacaaatagaccaaggattgatgctccttcggtcattttttgcaggaagccaccacccatatcctgaacgatattgatccctttcttataaccataagagatacctgaataaagaaccaacaggcgtactaggttgaataagaagaagaataagacaggcccaagccagctaccgctcattgccaagcccgcacccaaagcagcaaatactgggcggactgtcccccagaaaatagggtcaccaacaccggccaatggccccatcagaccgactttgataccgttaatcgcaccatcatcgatcgttgcgccattagcacgctgttcctccattgccagggtgacacccagtacaggtgcgacgacgtaagggtgagtgttaaagaattcaaggtggcgtttgagtgcctgtttacgctcatcggtattttctggatacaaacgacgaagagctggcaccatagagaaacagaaacccaaagcctgcatacgttcaaagttccatgaaccttgaaacacattagaacggagaaatacaccacggatatcactgggtgtcagttttttctggcctgctgtctgagcagtcgtttttgttgtatctaacatgttgctcatccttttaatctaattcgttatcaaggtcgttattggtgtgtccaggggcagccgctacctgagatttgttatatttagggcttagctggatgtacagcacggccataacaataccaataatgcctaatgcaaccaggttaaaatcagtgaatgctgctgtgacgaaaccgagatagaagaagggcattaggtaaccggcacgcatcatgttgataaccatggcgtaacccacaacgacgatcattcccccagcgatattcaagccatcggttaccacttttggaatagaagcaagtaactgctggacttcgttggtgccaaccgatagtgcaacgatcagggcagggatggcgatacgcatagcctggagcagtaatgcggatagatggataaagctaatcgcacgcaggctgccacgttctgccgcgttgtcagcagcatgctgaaaggcgactgtgatggtacgtacaatgatagtcagcacttgccccgctgctgccagtggaatggccaaagcgataccttcaccaatatcacgaccacccgcgatgaccaaaatcgttgagatgattgatgctaaggccgcatccggggcaattgcagcaccgatattcatccagccaagagcgatcatctctagtgtaccgccgataatgataccggttgtcatgtcaccaagaatgatcccgattaaggtacaagccacgagtgggcggtggaattgaaattcatcaagaatggaatccattccggctatacaagctacgatgaatatcaatgcaatttgaacaacggtaatttccattgtttgtctcctgtaaccaaattaaatttggtaagaaatttttgtcgttgagtaatagttaaattgctctgatctgattttcgtttttaaccttctggagtagatccatcatttgtaagcggctgtcactggcaaccttgcgggcttcaagttcaatgcctcgttcatttagttttttgaaggctgcaatatcggtttcatcaacggatattgcgttgttaacttgcgtttttccttgacggaaagccattccaccaatgttgacagaagtgatatcgacaccgtcttcgactaaacgcaaaacatctgttgggtttgtaaacagcaacatgacacgctcattggcatatttcgggttgttataaacgcgaacacattttgcaacatcaacaacgtgagcactgagccccggtggagcaacttgttttagcaaggtggtacggacagtatcagcagcaacttcatcgctgacgacaatgatccgtttgacattggtttcttttgtccaacgagtagcaacctgaccatgaatgaggcggtcgtcaattcgagccagtgcaattttcatatgaccaccggctgatggtgcaaatgaaggtgccgcaacggatgccacgggcttggcgggttcagctatttgaggttcttctgttttcagggcccggatgccttctttcccggtttccagagcaacggaaaccagttctgccagagatgggtcatcatctcgacacataaaggtttcaactaacattggaacgttaactccggtgatgatctcataattctctttatctacggcgatacggctagccgcattgaatggacttcctccccatgtatcgacaagaaacagtacaccttgctctgtattaagcgtttccagtttactgttgtatttttcaaataaggtatcggcattttcaccaggaacgaagtcaatgtaagagacattttcttgctctccaattaacatctctgcggtatgaagcagttgctcagccgcagctccgtgtgtgccaatcataatggctatactcacctgttttcccctctattaacaatatatacccgttatctttcaagttgcctctttgttggctgcactcactcaccccggtcacataattatctatactcccggggattcgctcccttgccgtcgcgatccatcttgaaacccatagggtataaacgcaggattattacacagttactgcaataaatttgatgaatcatccctccaataaaaatcttatttgtacgaataatgaccttttatcaatatgatacctaaatatttgacttgatttagactttatctcttattgactgaaaaaatcggctgttagattaacattagaaataccagaggaaaattgctgtcagtcagaaaaaatgaaatagataaaaatgttaaccacaaaacaatttaataagctaaaaattgcaaaattaatttataattatctgtaatttgcttattgttagatatttattctgccatcggtagcatcttattaatttaaaattgaaaaaatattcatctttttagatcaaaagatgatcattttaagttttggtcaaaaaatatcccaaccatagggttgggatattttcattgcagaagcatttactgattaaaaaacaggttatttatttgattaatcacactgaaccttaattgctaacccaccgcgggatgtttcacgatatttggcgttcatgtctttgcctgtttcgtacatggtttcaataactttatcgagagaaacgcgcggttcgctggtacggcgcaaagccatgcgtgcagcattgattgcttttactgaagcaatggcatttcgttcaatacaaggtacttgtacttggcctgccaccgggtcacaggtaaggccgaggttatgttccataccgatttcagccgcaatacagacctgttcagcgctgccaccgagcagttcagcaaggccggcagcggccattgagcaggcaacacctacttccccttggcaacccacttcagcgccagatatcgatgcattcattttatataggatgccaatagcgccagaagccaggaaatagcggatatagagctctggtgttacaggttcaatacaatggttgtaataagcgagtacggcaggaacaatgccacaagcgccgttggttggtgcggtaacaacacgcccacccgcagcattttcttcattgactgccaaggcaaacatattcaccaaatccacgacattcattggatcattagacaaattgtttgatgaggtcagcatacgatgtaatgccgctgcccggcgtggtacacgcagtgggccaggtaaaatcccttcggtgttcaaaccacgttcaatacaagcctgcatggtatcccagacatcggcaaaataggcattaatttcttctttgctgtggagatccagttcgtttttcatcattaaaccggaaatagataacccggttttattacaattcatcagtaattcttttgctgaattgaatggatatgaaaccggtttggtatcctgagagggtttaccaaagtgctcttcatcaacaataaaaccaccaccaatcgagtagtaggttttgctataaacttttttgtcccccgcgaatgcgtgaatttgcatgccgttttcatgtaatgacagattatcacttcggaaaaccatgccgctatcacgtgggaaatcgacttcatgtaaaccgttggctagtttaatacgctgtgtttgctctacatcacgaataaaaccggggatcgaatcaatatcaacggtggcgggtaaattacctgccagacccatgataatggcgatatccgtatgatgacccttgccggttaatgagagtgagccgtaaacatcgacggctacacgcgtgatagaaggcattaatccctggtttaccagatcgtcgacaaactgtttgccggctttcatcgggccaaccgtatgagagctagatgggccaataccgaccttaaacatgtcgaaaacgctaatcacgctagactccttaaaaaagatagaaatgatatagttatatatattgaggtacgctactttactgtgatttagtagtgttgataagggagtttacaggtttttttgaattatgatagcaacagcgataaagatgggtaaaaaaaatacaaatttgttatccttaaatgatttggatcaaacctgaacttgttgagctaattgatgaattattgtcgctgttaatccccaaatgagatgctgctgataccagtaaaaatagacacgatgctgctgaccacggcgactaacatcaagataatgataactcgaaagtgaaagtgcttcagatagaggaacttcgaatattttggcaacttctgccgggttgctgtggagggataatccggggggcaataatccgacaataggcgttaccagatagccgccgctgctatttaaaggggcgagttgtcccagaacctgaactttctgatgaggtatgttaacttcttcttccgcttcccgtagtgctgtcgcgattattgatttatctttaggatcagcaacgccccctggaaaggcgacttgaccggcatgtgatcgtaaagtggctgagcgtcgggtcaataataacgttggcttcggtttgcagatgattggtaataacaccgcagcatggcggttgttatctgaaagccgtttaggtggtggtggaagttgtaactgaaatctgttaacgaaatcagacagtgatatcatattacttttattttccctagttgcggtaagatacgattcaacttatcaaatgtttcctgatactctttttcagcagtgctgtcggcaacgattccgccaccggcccagcaatatattttttctttctcagttaagagggtacgtatggtgatattgctgtccattgtgccacagaaactaatatagccaattgaaccacaatatccatgtcggcggtgaggttcaagctcttctattatttccattgctctgattttaggcgctccggtaatagaaccaccgggaaagcaggcgcgtaataaatccgtagcatgttgttcatttggcagtgttgcggtgattgtgctaaccagatgatgaacggcagggaattgttcaactaaaaacaattcaggaactttaactgaccccggtgtggctacccggccaatatcattacgcaataaatcgacgatcatcaaattttcagcctggtcttttttcgaggcggccagttttacagcttgcagtacgtccttttctgtatcacttaagcgcggtaatgttcccttaatcgggcgagtttgaatttgtttattctccaggagtaaaaaacgttcaggagagacgctgataacgctgttttccggtaaacgaataaaggcggaaaaaggtgcacggttgttctcattaagttttatgaatgcttgccattcatctccttggtaatcagcgcaaaatcgttgtgccaggttaacttgataacaatcaccacttaacagatagtgatgaatgcagttaattttctcatgatattgtttggcactcatatttgattgccattcactggtcaacgtaaaagccatttttggcgaaacttggtgagaagtaagccagttcaggcgcgtgtcaacatcactgtagctgaataaaatcacctcttttttgtgatgatcaacaatcagcgcccagtcataaataccgattgccatatctggaaatgacaactcatttttggcttgtaatggtaactcttcaaggtaacgcccaagatcatatccccatagacctagcgcaccgccctgaaatggcaaatcaggatcacgctttgctgtaatatttaatttttctagttgtctttttagcaggtaaaagggatcttcctcagtaatatagctatcgccatcttcatttatttcagttgatttattatgactaagcagtgttatccgtggttctgcaaccagaatatcgaaccgattatgaggatggttggcagcaccagaatggagcagcattgcccaagactgatttgaaatcggcgcaaaatagttgatggcagcgtctggttgatagggtaattgccgtttttgtagtgaaatgctcattattgtgttggtttagcagttgtaatgcaaaagtgagtcttgattttaatccttacagattaacatagaaatccattccttacttgagttaaaaatcgctatactcttcggcatagatcactttatagaggttattatcatgttttcagcgatgccagctttatcccatgaggaacagcaacgagcagtagaaaaaattcagcaattgatggttgaaggaatgagcagtggcgaagcgattgcgttggttgcacaagaacttcgtgagcggcatcgaggaaaagagcaggttaatgtggtgtttgatgatgaaaaatgaacataattaaattatttatttaacaataatcacacatttgttttacctgacatgttaggttagctccatatttaatctcttattttgagatattaacgggaggtagtatgaaaacatgtcatatcattaacagagttggcctatcaggtgttgcacttttgctcactgtttcattcacagtatctgctgtgtcggagaacaaacgtgttgataaatttatttcttgtgacaatttaactaaatcgcaaattgccgctcaagtaaagcgtgattttctgcaaaaccgcattaaccattggtcagaagatagaaagcaattgggaacttctaaaccagtggtgtgggtaaaggcggaaaatatcactggcgataaagagatattaaaaattccgctgactgttcgtggttctaagcgtgacaaagattaccgtgttgtcgttgattgtcagcaaaatacgattagctatagtgaattgaaataacattttctgatagttatctctacccgtcatttgacggataccagatttggtgttagccagtaaaggaaatgttatgtcagaattgaaaaaattatatccggcttgtgaagcttatcgttcggggtatttggatacaggcgacggtcatcaaatttattgggaattgtgtggtaatcctgtaggtaagccggctgtatttattcatggtgggccgggcggtggtattgcctcttatcaccgtcggttattcgacccaaagaaatatcatgtcatgttatttgatcagcgtggttgtgggcgttcaaaacctcatgccagcttggaaaataataccacttggcatttagttgaagatattgagcgtttacgtcaattgatgggagtcgaaaaatggctggtatttggtggttcgtggggttcaactttatctttagtttacgcccaaactcatcctcaacacgtttctgaattaattcttcggggaattttcttactgaggccacaagagttgcactggtattatcaggatggtgcttctaatttcttccctgacaagtggcaacgaacggtatctattttatcggaggaagaacgaaaggatgtgatcaaagcgtataataagcggctgactaatcatgatcttcgggtgcaattagaagccgcgcgtctctggagtttgtgggaaggagagacggtaacattgcttccttcaaatagtgtagagtgctttacggaagatgagtttgctttggcatttgctcggattgagaaccactattttatcaatgagggttttatgaatgaggagcagcaactgttgaataatattgacgttatacgggatattccggcagttatcattcatggccggtatgatatggcttgccgggtgcaaaatgcctgggatctggcgcaggcatggccggaagcggaattacatattattgaaggagcagggcattcatttgatgagccgggtattttacatcagcttattagtgcaacagataggtttgccgctcagtaattggatatatacccaatggatttcaagatggattgcgacggcaagggagtgaatccccaggctcatagagaactatgtgactggggtgagcgagtgcagccaacaaagaggcaacttgaaagataacgggtataaccaccggttatccggtggttatacctaattcttactggatgatcagcggcctttgggttcgtagggtaaattggaaagttgtttggataattggcgataatggactaaacgttgttgaaaatattgccgcagatgttcgggttgttcttgttcaactgtatcaggaagtactggcatattgtaacgttccttaaaggctacgccagaagctgccaaatcaacattcactttgtccatattctctgtagaaagttcggccagattgtgtttcatcagtgtctctctcatttacaaagtgataaagctaatccagactggtttttctggcaaggtatgaattgattattttataaagataaataatattcattatcattaaatataaaaattccttgatgaagattattttgtaaatgtaattcattttcatttgaatatattaaatgagattcattttcatttttttattgaaaaatatatttatatttcaatgtgatatctgtttttgatttatttttattatttggttttattattttcatttaattggcataatatagttcaattaataactggagtatctattatgttaaatcaagaagtggttaataaattaaatgagcagatgaatctggagttctattctgcgaatttatatctgcaaatgagtgcatggtgtagtgaacaagggttaccaggtgccgctgcgttttttaaatcgcattctcaggaagagatgcagcatatgcatcgcttgtttgagtatctgagtgatacaggcacaatgccacgtttggggcaaattgatgcaccttcggccgattatgaatctatatctcatgtactcaatagaacttatgatcacgagagatttattactgccgaaattaataaacttgctcatttggcgataaccacgcaggattattctacttttaattttctgcaatggtatgtagcagaacagcatgaagaagagaaattgtttaaatctatccttgataaactggatatggttggtgaggatggtaaagcgcttttcttattagataaggatctgaaaggtctggctgctgcaaatcctgtctaatgaaatggaattaattcaccgcagtagtcgcaataactttaggtatttaaagtcaatactgcggttttcctttatttttgcgcgatagttcacaagacgaaattcttattgtaagttatcgcagataaaataactcttttgatataaaatgatgacaattcatagagattcatttgaaaattaagaggttattgatgaccattagcacaatccgctcttttggccgaaaactatctgctttaattgtcctttttgttgccatatcttgccagcaagctttggcccatgcgcatttaacagaacaaattccggcagaagatactacagtagaaaatacacctcaggtgatcacgctaagcttttcggaaggtattgagctgagttttagtaaagtaaaagtgattggtcctgaaaataaacccattaaaacgggaaagttaaagcttgatccggcaactaatacaaaacttattcttcctatcgaagataaactgacgacagggagatatgatgttaactggagcgtggtctctgttgatgggcataagactaaaggtgtctatagctttacagtgaaataattatgtctctagcggcgctgtatgttctttgtcgcttcacgcatttcgtggcagttatgttagtgtttggctttagcatatttactgccatattggttcctgagcgtttatctgttctgattgatgcgcgccttcgtttaggggtaattatcagtacagttgtgacattagtaacaacaattggatggttggcaattcaatcgggaataatgggtgatggttggcaggatatttgtaatctagaaatctggttggcagtattgggaacaacttttggtaaagtttggcaatggcaaatactggtttcaatagttgctacagggtttttgtttatcagtaaacaaaaagtcagaaatattttgatgttaatcagttctgctgttttactctcctgccatgcctttatcggccattcggtgatgcatgatgggataacaggtgttttttctcagattaatcaggtaattcacttagtgagtgttggatactggtttggtggattatggccgtttttgttatgcttgcaatttttacggatacaaaatgaattggctatagggttggataaacagattatgatctctatgatgcgtttttccacatatggtcacgttgctgtaaccctgattatcattactggcattataagcagcttaattttgctgccgaactggccgaaatatagcggtagtgaatatcaatccatgctatggctgaagatagcattggtggtgggtatggtgatgcttgcattaattaaccgctatatcttggttcctaaactgaagcaacctggccgctatcaattgttgattatcaatagttgggttgaaattattcttggggcattggttctattatgtgttgctgtttttgctacttatcagccgatttgatgttcttaattaagcgcctatctcaatataccctatggatttcaagatccatttcgcttgcttttatacccgtcatctttcaagttgcctctttgttggctgcactcactcaccccggttacatagttatctatgctcccggggatttgctcccttgccgtcgcgatgcagcttgaaatctataaggtatatatctacattggtaactattatgaaacgtttacttttattactttccttattttgtctctcttttcaaaatgttgctgcaccgattgaaacggtgagtaagctacaatttggtgataaatgggcatttacgcgggaagaggtgatgttggattgccgagcaaataaggctctgtttgtgattaatccaagtacgttagtgcaatacccattgaatgatatagccacggatatgatgaaggtagggaaagtgaatgctaagtctttggatattattctattggctgatagcaaaaatccgactcaaaaaatgagcatagagccattccaacaagccgctttagcattgtgcgataagagataatgtcattgagtaagcaatatacccgttatctttcaagttgcctctttgttggctgcgctcgctcaccccggtcacatagtttgctatgctcccggggattcactctcttgccgtcgcgatgcatcttgaaatccgtagggtatagcgtctattttggcttaatggaagatgttgtttttgattatttattatccaaaaagttggtaaaaggcaagtatgtcagctattctttaaattgtaagttgtttttcgtctcaatgacacttttagcgcacggctcttaagagccattttccctaggccgagtagaggagtcaactcggcctttttttatcacaagttttgtggacatcagaccaccctcataacccatgcatgtttttgtctatcataatgctttcggtagagaagaatgtgtttatcgttgagtaaggcgggaatactggtatgttcatcccatccatccaactgcatacaaagttcctggtcggaattacaaggaatactaatggtgatatcgtcttcttgggaaggtgaagagagaatagcatcatcaatttcgtagctggaaattcttaattttgtctggttcattatcgctccttaacttttagataacaggtaagaccagtggggccatcattgagaatagatcaaatagctgagattgccagtaataatattttctgtgttggataatcggtagatgatattgctgttataatgatctgttctaaaacttactcttgtcatattgctttttttatctctgctattctttgaccttttatacattcagtaggaaatatttatttggtgtggtagtaaggactcaaagtgttggtgatggtgtggtaactgcaataattctatggataaattgtttgaatgttttgtttttttactacaccactagtcaactctcaaatgaaagaggctaatgaacgacactactatcagataattgatctttataattgtgtaagaactcaatttgattttattgtatgagggcatagaggcactaacagtgaatcatattcatactggttgtacctctgataatgttttggtgaagtagtgttatctcactagcctttgcaagcacttaataaatataattaaagaatatcttattaaaggcagtaaaaaatttacgtcagtgtgacagactgttaaccttattgttatgggcatttgatgtttttttgatataaaaatagagatgcgttttgtgaatttcatcggataggtcaattatgaataaaaatgagttctatcgggagcttacgggggacctaaaagctctgttgtctggtgagtatgacttaatagcgacgctggctaatgccagtgcattgttgtatgaacgtttgcatgacgttaactgggttggcttttacttgattgatggtaatacgttggtgttaggcccatttcaaggaaaagttgcttgtgtcagaatacctgttggcaagggggtatgcggaacggctgtattggaaaagcgtatccagcgtgttgatgatgttcatgcgttccctggtcatatcgcctgtgatgttgctagtaacgctgaaattgtgttgccgttgatcgtaagcgatagaattatcggtgtattggatattgatagtacggtctttaataggttcgacgagaaagacgaatttggcttacaagctcttattgatgggctttgtgctcatttagaacagtgcgttgtgccgaaatatgttgaattgaatgtaacttaacatatggataacgtggcatttatcagcaacgctattataatgacgccagttcatgcctatgctggttggcaaaaccgttgtaatcaggaaatttcatggaaaatcaacctaagttgaatagtagtaaagagattattgcttttttagctgagcgtttcccgctctgtttcgtagccgaaggtgaagctcgtcccttaaagatcggtatttttcaagatatcgttgaacgtattcaggacgaagagtgtttaagtaaaacacaactgcgctccgccttacgtctgtacacatcaagttggcgttacctgtatggtgtgaaagaaggtgcccagcgtgttgaccttgatggtaattcatgcggtgaattggaagcggaacacattgagcacgctctccagcaactgactgaagccaaagcacgggttcaggcacagcgtgcagagcaaagagctaaaaaacgtgaagctgaaaatgtggctgctggtgaaaaaaatgaacggcccacagccaagaaacccgctcctcgtcgccgtgctaataatactgagggggaaaagcggcagccaccacgcccgcaaaagcgccctcagcaagcacgtaaaccagttgctaaacctgttcaagctaaacctattcaagctgcaccgattcagattgtcgatgtttcatcgctgaaaattggtcaggaaattaaagtaagagtgggtaaaagttcagtggatgcttctgtgcttgaagtcgccaaagatggtgtacgggtacaattgccttccggtttggcaatgattgtacgcgcagaacatttacagttctgatacggaggccgacctgggcatgaacaaattcgtcagactggcttttgtcttaggtgtttcaatttttggtacttgttatgcaaatacaaacagtccagtggctgttcctgttggtattgaacaattacctatattgaagcaagaacctcagcattcaacagttagcgagcgggtaacatcccgcttcactcgttctcattatcgccaatttgatttaaatggtgatttttcggcaaaaatatttgaccgctatctcaatatactggattacagccataacatattattggcgtcagatgttgctcagtatgccgataagaaaaagttgttaggcaaggaattggaaaatgggaatctggaaattccgtatgacttgtttaatttgttacagaaacgtcgctttgagcgttatcagtacgctttatcgcgtcttgaacagccaatgagttttgatggtaacgatacaattgatgttgatcgttccaaagccccttggccacagagtgtggaagagctaaataaactttgggatgctaaagttaaatatgattggctcaacctcaagctcagcggcaaagaggacaataaaatcaaagagatgcttaccaaacgctatcaatccgcgttaaaacgtctgacacaaagccagagtgaagatgttttccaattgattatgacagcgtttgcccgtgaaattgatcctcataccaattatctttcaccacgcaatactgaacagtttaactcagaaatgagtctttccctggaagggattggtgctgttttgcaaatagatgatgactacacggttataaattctttggttgctggtggacctgctgctaaaagcaaagcactaaacgtaggtgataagattatcggcgttgcccagtcaggaaagtctatggtggatattattggctggcgtttggatgatgtggttgcgctgattaaaggacctaaagggagcaaagtacggcttgaggttgtttctgataccaaaggggcaaaaccacgtactgttattttaactcgcgaacagatccgtttggaagatcgggctgtgaagatgtcagttaagacaatcggtcaggaaaaagtgggcgtgcttgatatccccggtttttatgttggtttgactgataatgttaaaactcaattacaaaaactgaccaaacagcatgtcagtgctattgtcattgatttgcgtagcaatggtggtggtgcactgacagaggcggtttctttatcaggcttgtttctgccaagtggcccggttgtccaggttagagataataatgggaaagttcgtcaggattctgatactgatgaagtggtgtactataaaggacctttggttgttctggtggaccattttagtgcttctgcttctgaaatttttgccgcagcaatgcaggattatgggcgagcgttgattgttggtgaaccgacttttggtaaaggtacagttcagcaataccgttctttgagtcgtatttatgatcaaatgatgcgccctgattggccatcactggggtctgtccaatatacgattcagaagttttatcgtgtggatggcggtagtactcagcgtaaaggggtgactcctgatatcgtaatgcctacgggggttgatccggcagaaaccggcgaaagtttcgaagataatgctttgccttgggatagcattcctcctgcccgttatacagggtctaaagttattgctgcattggttcctcagttgaatgttgttcacaatatccgcattacaactgatccagaattcaagtatatcaatgaggatattgctcactataaggcgctgaaagagcataaaaatattgtttctctgaactatgcacaaagagaaaaagaaaataaagaagcggatgctctgaagttgaatcgcataaatgatcgctttaaacgcgaaggtaaaaaaccgttaacttcactggatgatttgcctaaagattatcaggggccagatccctatcttgatgaatcagtgaagattgcacttgatttagcgcaccaacctgctgagaaaatgttggctaaatctaagtaaaataatgggttaaagcttgttaatgattaatgtccaatatcgttcgcttgggatgttttgagtgaacgatattgtgctgtcagtaatatgaacagtctttttcttttcaggaaagatgaattatttcacattttctcagcattaccaggtattagcgtgttttgtttaaccaattggtgttaggctaatgtgggtttttttatgattttgtaaagttgtgttggttttatcgcttaacaggctaaaagccttgaatatagtaagaacagccttatttatagagtagttctgaaagtgcattgatttattaataaaggaagccggtttttatgatgcgaattgttttgttcctcctcactaacctcgctgttatgttggtgttcgggataatactttctttgacaggaattcaggggagtagtgtacaaggtttgatgattatggctggcctgttcggtttcggtggggcgtttgtttctctgctgatgtccaaatggatggccctgcgttctgtgggtggtcaggtcatcgaacagccagcaaacgaagttgaacattggttagttgaaactgttcgcagtcaagcggaacaagtcaatattgccatgccccaggttgcgatttatgccgcgcctgatattaacgcattcgctaccggagcgcgtcgtaatgcttctctggttgctgtcagcagcggtctattggataacatgagtagggcagaagcagaagctgttattgctcatgagattagtcatattgctaatggtgatatggtgacgatgaccttgttgcaagggatagtaaatactttcgttatctttatttcccgtctactggctcaagctgtatcaagtttcctgtctggcaatagtgacgaggaagagagtaactcctctggcaatccgattgtttacatggttgcttcaatggtgttggaaatagtatttggtattctggcgagcattatcacgatgtggttctcgcgttatcgcgaattccatgcagatgcaggttctgctaagttggtcggtcgtgagaaaatgatcgctgctttacagcgtctgaaaaccagttatgaaccgcaggaagaaggcggtatgatggcgttctgtattaatggtaaatcaaagacattcagtgagctgttcatgtctcacccgccattggacaaacgtattgaagcactgcgtagtgggcaatacctgaataaataatattgtgaatcaaataaaagccggggaaatcaaatcccggcttttttacagtttttgaagttttaaattatagctgacttaattcaacatgttcttcctgatcgaagatagttttatcagtttgtcccatcagttggctggtaatagtgccagcagtcattgaaccacttacattcagtgccgtacggcccatatcaatgagaggctcaacagaaatcaataaagcaatcaacgttacaggtaatcccattgcgggtaagacaatcagtgctgcaaacgtagcaccgccacccacaccggcaacgccagcagagctgatagtgacaatgccaacgagtgttgcaatccacatcgggtcgagtgggtttatgcccactgttggcgcaaccattgcggccaacatggcgggataaatcccggcacagccattctgaccgattgttgctccaaaagatgctgaaaagctggcgattgattctggtacgccaatacggagtgtctgggtttcgacattcagtggaatactggcagcactggaacggctgctgaatgcaaaggtcaacactggccaagtttttttgaaaaatctaagtggattgatgccgaagagagaaagtagaaacccatgagcaacaaatactagtgctagtgcaatgtaggatgcgataacaaaggttcccagttttgcaatttcatagatattagagttggcgacaactttggtcatcagggccataacaccatacggtgttaagcgcataaccagacgaaccagtttcattacccatgcctgtatagtgtcaatagcgactaatatgcgttcacccctctcatgatcatctttcaacatttgcagggcagcgatacctaagaaggttgcaaaaataacaatgctgataacagaagttgggttagcgccggttaaatctgcgaacggatttttaggaataaaagataaaatcaattgtggtacagataagtcagagactttgctgacatagttgttttcgatagcagacagacgtgttgtttcttggggaccttgaatcagaccttcagcagtcaggccgaacaggttgataatcatgataccgataagcgctgcaatcattgtcgtgaataacaacgtcccgatagtcagaaagctgatttttcctagagaagatgctttgtgtaatttggcaactgcactcaaaatagaggcaaataccagaggcataatgaccatttgtagaagttgtacgtagccattacctacaatgttgaaccatgatatggattccttcactatggtattatcagaaccataaactagttgcagtgctaagccaaaaataatgccaatggcaaggcccgcaaaaacctttttcgacaggttccattgccgtgaactggcttttgacaatagcaaaagcagtgctacgaagacgagcacattcgaaatgagtggtaaattcatccccaaactccagaattcaatttagttaagttataagttgtatcgaatcgtgtaggtttgcaaacgaacacattacaacaagcagttggggaatatagtatcagcttaaactattctcatttataactataaagaatttaatataacaaatgtgacttttaagatttatttttagtcaattaaagcattagaaatagagatctttgatgcgatttatataaaaaagtatagaagattcaatatcttctggtagaaaaacggcaatgacaattaataaggcagaaataaacctttctgctttcttatttccttgcttgccaagcacaggtagacagaaacgtattttgattggccataataacggcacaccagcaggtgttagcatatctgcaatcagatggctcaaatagccaacaatcatggcatggaaaaaatcagttgggattagccactcttcggggatttttagccaaaataaagtaatccctaatatgagagcaagtaaactgtgagtaaagcctctatgaccacagagtttggcaataggaatggagataaatctgaataatctacccaaggttgaattagggtgatcgatatcgggtaacaaggcagtaagcagtacccctggtagcatatgcagccaatctccattagctatctctggtgttatttctagcttgtgtgccaagataatgctggcaactgaaaataaaagatgcccttctgcggtcataaattcctctgactaataactgtctatccatacagtcggcgaagtatagagggttttatgtgggtaagatagagggtgaaaagcaaaaatatcttatttattaatatatacccgtcatctttcaagttgcctctttgttggctgcactcactcaccccagtcacatagttagctatgctcccggggattcgctcccttgccgtcgcgatgcagcttgaaatccatagggtatatagcgttaattttttgtttgacagaataagacataagcgctacggctgctatgtgaacaataagaagctgccatcggcataagtgatggcagctaaagtgataatcaggtgatgttcatgacagtgagttgttcgagagaatgcagtttaatatctgcgagaacccaacgtggatcatcaaagtgatgagcagatggcacaacgattgaacgcattcttgcagcttttgttgctatcattccattgaatgaatcttccagggccacacaatttatcggagcgacatccaattgttcagcagcgcgtaaataaacttcgggattaggtttactgtgaggtaatttggcagcagaaacgacagtatcaaaatagtgattaagactgaacatttcgagtacttgttccagcatatattgtggagaagctgaggccaggccgattttcagtccttgtttgcggcaaaggtttaaagcatattcaacacctgggagtaagggacggttttcttttaccaaatcgataacatggtcggtaattcgctgttccacgtctgattttgataccccttgccagggagaagcctggtaccaaagttccacaacttgatcaattcgcaacccaagagtatctggtagtttttctgctaaagaaaaatccagacctaattcactaaatacttctttttctccttgggtccaatagggttcagagtcaatcagtaagccgtccatatcgaaaatggccgcttttattggtaaatgaaaagacatttaagtatctctctctggtcagacagttagcgaaagctgattgtaacaatctcagtaggtgaaatcttttcctgatcgggaacatggtaagaaatgcttagttaattaaatataaagttaaatttggtgattgatgggctatgattagccaaaaataaaatctgcttattgttatgaggggtatcgatgacttaccaaaaagccggatacatcgctattattaagcgagttttaggttggatgatttttgttccggcacttttatcgactattgtttctgtgattaaccttgcctggttgcacggtattaaaggtgatggtatcaatgctgttttggatgatttcctgaaaatgatggctgaagtggtgcgttttaataccccatttctggatttcttctggaaaaattcaccaacacctgatcgtctggctggttttaccggatcaacgcttggtttcctgattatctattttcttatttttttcggccttgctatgaatgcgtcaggtcaacggatatacagacaagtgaagtttatacgagaaaacattgaagatcagcttattattgaaaaagctaaaggcaatgatagcctgacaagagaacagattgaattaaaaattaaacttcctcgtcatacattgttcagtcagatttatatcttatatatttcaccggtaattatcggtgcaattttttattttctattgaaaatcttaggctggtagattctccggttggctatagctgcggaataagtattttcgcagcctgattgcccatctattggctattttcagtcaaaatattatcgataatattttgagccgtaataagattatcaccaccaaatagattacaccggttaagcaaataatagagctgatatacaggttgccgttcaataaagttggtagggagtggccatatactctgatagccatcaaaaatttgcattggtaaatcagggtataacggtaacatagcgaaatcacattcacgatccccccaataacaggctgggtcgaaggcaacggcttggtcatccagcgaagcacaattagcaggccagagatcgccatgtaacagagagggttgtggctgatggtgttgaagtttgttacttatagcttgaacgatattgtcaatatcaccaaatatcatgtttttttctgccgcgatttgtaattgccaaccaacccgcttttccgcataaaattgatgccaacgtcgttgccagctattaggttgtggagttgttgccagcatattgtcaaaatcaaagccgaattgaggttgttcactccattgatgaagttttgccagttgttgaccgaagcaataggcactgtgaaggtcaaaagattttaaaggcagaaattcaagcaatagaaagctatggtcacgagtgttgccaataccataaacagttggaacacggatagtttggctgcgtgccaggagttcaagctgttctgattctgctttgaagacagggagcatttcgcgcagatttgatttgacaaaaacttgttgttttccatgtgtgactcgccaagcttggtggatgtctcctccggctaactcagttttatcgtgaatttcagcaacaccgaaatgttcgtttaacaaacgatttactgtctgccacatggttcacctctctatgtcgtcaattactttatgaacaattatagtcagagaaaacatatgatcaggtaaaaaagatgattaacagggttatatctcaaaacagatataaccctttttgttattgattgggctcgttagagatttgtagggctgcttgatacgttttacgtttggattttgctcttacaagttttatctgactgtaagccagtgccagtgtaaagaagatagcctgaacaataacaatgcatggccccgttgcaccatcaatgtggaaactgatcagagtacccaggacactggaactgactgatgcaatgatagcgacaattaacattcggtcaaaactgcggcataacatgaaagcgataatgcctggtgatatcaacattgcgataaccaaaatcattcccacggcttgcagggaagcgacgatggtcatggacagcaggcaaagcaaaccgtaatgcaaaagtttaacaggcaatcctactacgcgtgcttggttcggatcgaagcaataaagcatgaagtctttgcgctttagcagtatcaccgccatagtgatgcaggtaatccataatgtttgatgcaactcatctttagtgatccctagtatatttccgaacagaatatgagtcagatgttggtcggtatctatgcgggcaaaaagaactaaaccaaaggcaaacatgcctgaaaaaacaattcccatgacagtatcttcttttatccggctatgttctttcagatatcctgttgcaacagcacaaaagataccggaaaggaatgcgccaatagccagcggtataccggcagcaaaagccagcacaatacctggtaataccgcgtgagaaatggcgtcccccattaacgaccagcctttaagaaccagataacaagagagtattgcacataccgcgcctgttacaatcgctgcgaatattgcccgttgcataaatggaaacataaacggctcagtgagtaactgtgtcaactcattcataattgtgttgtctcctgagccaaggctgaggattcttttctggcacgtatacgtgaagcgaatagcccatgctttggtgcaaagaagaatgctagtaggaaaataatggtttgcagcgtgacaatgacaccaccagtagcgccgttaaggaagaagcttaggtaagcgccaaatgcactggtcagggaaccaatagtaacggcaatgatcagcaggtgcttaaaacgatctgttaataagtaagctgttgcgcctggagtgacaaccattgcaatcaccagaatagcgccgacagtttgtaaggctgcgacagtacaagcactcaacaaagtaaaaaaaatgattttcatccgcaagggagataagccgatagagcgagcatgcgtttcatcaaaaaatacaattagcaaatctttccagataaacatgagcacgataaatgaaatcgcaataatgatttcaacttggagaacatcttcatccgcgatgccaaggatattgccgaaaataatagtttgtacgttaactgatgtaggattgagggaaacgattaataagccggccgcaaagaaagtggaaaaaatgaacccgattactgcatcttcacgtaaccgagtgatatgacgaactaaagtcatagatagagctgccagcattccggtaaaaaaagcaccacctgcataaggaagacccagcgcataagcaccagcgacgccaggcacaactgagtgagagagcgcgtctcccatcaatgaccagccttttaacatcaggtaggaagaaaggaaggcacagacagcaccgacgatggcactaacccagatggcttttaccatgtaattatagtgaaaaggttgcagcaaaagttctgtcatgattgacgcttctccttatgctgaccctgccttggcggaacatgatgatcacgaccataaaatacggctgcgcgttcatcatcagtaataacagtcaaggagcgtggatcatcatcatcatgtaattccggaccggatagattaatatgacgaagcacgccaccaaaagtcatctctaaatttttttgggtgaacgttgtttctgttgggccacttgctagaaccgttcggttgatgaggataacatgatcgcagaattcaggcacgctaccgaggttatgtgtagaaaccagaactagatggccctcatcacgtaaatcacacaacaggtcgatgatggcattctctgtttttacatcaacaccagtaaaaggttcatctagtaatagaactttaccttcctgagccagagcccttgcaagaaaaacccgttttttctgtccgcctgagagttcgccaatctgtcggttgcgtaaggccgttaagccgacacgttcaagtgctttatcaacagcttggtgatctcttttacttgggattctcaggaatcccattttcccatagcggcccatcataacgacatcagaaaccaatactggaaagttccagtcgacttcttctgtttgagggacatatgcaataatatttttcttcaaagcatttttgactggcatatcactcagcgttacttttccctgagatggacttaccagtcccatgatagtcttaaacaatgtggatttaccactaccgttaatgcccaccaacgcacaaatagttccaccggtgatagaaaaacttgcatcataaatagctgtgtgaccgttgttataagtcacagtggcgtcatcaacgactaaatgaggacgttcgaacagtatattgctattcattgattaaatccttttgcgattgtatctacagttttgttcagtaaatcaatataagttggtactgggccactactgccggagagtgaatctacataaagaacgccaccataacgggcatctgtttctttactgacttgtttagccggtttatctgaaattgtactttcgctaaatacaacggggattttgtttgctcttacagtatcaatgacatgacgaacttgttgtggtgaaccttgttcttccgcattaattggccatagataaacttccttgaattggtaatctttagctaaatagctaaaagccccttcactagtgactagccaacgctgatcctgtggaatacgggaaagacgttctctcagtggagaatccagttgtgcgattttttcagcataggctttggcattcttattataagtttctgtatttttaggatcgtatttcacaaatgcttggcgaatattctcaatatagattaaagcatttgtgggtgacatccaggcgtggggattagggttcccgttgtaaggcccttcacggatagggagtggttcaatgccgtcagtaataacaacggcaggtacatctttaaggttttcaaagaagcgttcaaaccagcgttctagatttagcccattccaaaggatcaaatcagcatgttgagattttataatatctttgggagtgggttggtaatcatggatttcggcaccaggtttagtaattgattcaacaattgctgcatcacccgctacattttgtgcgatatcttgaatgatagtaaaggtcgtgacaactttaaattgtttggcggcggataccggatgactaaatagaatgacagataagagaatcaacataattcccagaacaggaggcgaaagtaacagcagagaaagttttttcttcataaattcaaaccttacttgttataagtatatgataacgattatcaatatcatttaagtaaagtcaagatgataaaatttggaaacaacgattgttgcgatagtcatcccatatgatatgaacatgaatacagtgaaaagttaagtaaaaatatttttagattgtaaacgaaattgtatatgctgcgctttagtaacatttgatccagaggattatagggtgaaattaaaactgagctttgtggcactggtcgtgctgttagtcggttgtgctgagagaaatgttcagcaaacaaatgttggcaaacagtccggtcagcaacgtatgcttagcaatactgccaacgcagctagaatttcttcttctttctcgccgacgccttttgatacctttattcaacaagcatccaatcggtacggtgttgatgaaacgctgatcagagcgattattcaagttgaatccggttttcgtcctaatgcagtcagtaaatcgaatgcaattggccttatgcaaattaaagcatcgacagcagggcgggatgtgtatcgacagaaagggcgttctggtcagccaacaacacgtgagttgaaagatcctaaaactaatattgatcttggcacggcttatatcagtatcctgaaagagcagcatctggcaggtattgataaccctgaaactctctactacgccactattgttgcctacgtaaatggtgcgggtgctcttttacgtacttttaatgcagatcgtcaattagccgttaataaaataaaccgcatgacgccggatgagttttatcagtatgttcaggataatcatccagcccctcaggctccacgctatttgtggaaggtgaaaaaggcttatcgttcgttagtaatggtagattgagtcgctggtaaaaatgacgattctatttgcgacaacctcacattggacaagggcttacggcagttttggctaaatttaactgcgaaaggcttgcactcaatctgtagtggattctggaagataaaatgatcccttctttgatgctaattgtggaggagggggctttaatatatgtgttcactggtgtttacaagctaaaaggtatgagacctcatttcaatttacatcatgcgatggtaaatatcgtttgatatccgataattcatatctaaagaagggctctcttcgaatatgtttcttaatgatcaatacggtatttaaccaatgttgaactcagctatattataacaaaacaatatagctagattgattctaattagaaattgttttcttatggggttaaagataactaacttctacattaactatagcgatttattaccattaaataacatgtactaaaattgattttagcctgaacttatattttaaagtaattaaatatacggggtacctttgtaaatgtttaataaattgtactttatgtggcattttatctgcaccttgtttgaaggggaactgttatttttcaataaattacctaattttcccgtgttaatgttaatagtcgttgatgattttagtctaagctatggaattaagtgtcaatcaaaagtgcttatccaaaaaataaggatgaaatagaacatatagttacgtttcatgaataaccatttcccgttcttaggaaagttatcattacagaattgctaataattaagttatttacatccaattccagagagaaagcatttcctgagtattttaattaatgcttaacgtacccgtttttatttcaccgagggtgggtgggacaacagttaagaaaaaacacttgtgacgactgtcaagaatgacagttgccaaatatctaacagatttgttgaggtagtagatgaaagacagcattactaaaaaagcggaaagtatccttaaagccgaacttctctctcagacaccagaaaatataaccaataacgtaaagaatatacctgctctgccacgtagctgcatcatagtcgggggaacgactcttgcggtgttctgtgccgaacaaattcaggcggctgggcatacgatacaagcaatgctgactaccgataccgttctgcaaacatgggctgccgggcaagggatcgtttgtgtgaattccgtcgaagcattacaagcacaaattgcgcaacaccctgtggactggcttttctcaatcgttaatccgattatcctgcctgtatcactgattgggcagattcgcggcggcgcttttaattatcacaatagcccactaccacgttatgcgggcagtcatgcaacttcttgggcgctgttagcacaggagacacactatgccgtttcgtggcattgcattgaggagggggtagataccggtgatatcgccgtgcaatggccagtatctattgaggagcacgataatgcgttttcattgaatctgaaatgctatcaggcggctcaggaagggtttattaagttgcttcgggatcttgatcagggtgagttggtgactcatccgcaagatctgacacgacggagtttttatactcagtctcgtcgtcccgatggtgggggatatttgtgttggcagcagccgggtgaggcactttcagctttagtacgcgcgttagattttggcgaaaattatttaaatccactgggttgcccgaaactgttactgaaatggggcacagtacggatttcctggcttcaacggctgaatcactattctgggggggcacccggtacgttgattgctgtagaagaggatgcttggcaggtaacaaccggaagtgaggatgtcaggatcggagggtttgccgcacttgagggtaaattactctccgccggggagcttgccgatatatcagaactcaagccgggcaaacagttgcctctgctttcttcgcaacaggctcagaatgtaaaagatatcctccaggcacttgcacccagtgaatcattctggcgtgagcgtcttgcctctttgataccgctgcaattacctttcgaaactgccggaaaatcagcagcccctaaatgggcattaagtgcctggcaatctccgctattagaaaatagtgaaaagttaaaaaatggtgaaaaagccccattgccgatactgttacagacattcgctatttatcttgcgcgtttgactcatcagaccgaattccaaatcggctggtgtgtggatagggtgaaaaatgaaccagacctgttgtctggtttggcgccggtggtgccaatgactgttaaggtggagtttgatcagccatggtgtacggtagcgaactggatgaatgatgagtttgcacggctggtgcagcatcgtacattttgccgcgatctcctttctcgttctccttcactgtgtgctatctcggcattaacaacaagccgcccgtggcgagttgcggtctctttcataccggatgacaagccgtgggagcagaatgcgttaggtgaattgttgacactccagatgaatactcagggtggttttcgctggatctacgatacaaaccgtttgagtgcggaagtggttcagcggatgagtgaacatttacaggtgttgtcatcatcggcggaagaaaaggatgatattcccgtctggcaacttaatttgttgcctgaagctgaacgcacgctgctactggaaacctggaatgcaacccaaacacgataccctgaccaaacatgtattcaccggttgtttgagcaacaggcagagaaaaccccggatgccacggcgctggtgtatgaagaacacattctcagttatgccgaattaaatgcccgtgctaatcggctggcgcatcaactgataacgttgggagtcgcaccagagcagcaggtggcaatttgtgtcgcgagttcaccggcgcggatcgtgggactgctggcagtactgaaagccgggggggcctatgtaccgctagatccggcttatccgggggaacgtctggttcatattttaaccgatgctgtgccagctattgtgctggcagataatacgggacgtgccgcgttaggcgaaaaagtgctggcagcgttaactgtactggatccgaatagtttgcctgatcagccggatagcaacccgcaagtatcggcattaaccccacgccatctggcgtatgtgatttatacctccggttcgaccggcataccaaagggcgtgatggttgaacaccgtgggctggttaacctgattcaggaaaaaatcgttcagtttgagattcatccgggtagccggatgttgcagtttgcctcatttggttttgatgcgggtgtctgggaaaccatgatggcattgtgcagtggggccactttggcgatcccggctgatacggttcgtcaggagccccgttatctctggcattatctggaagagcaggcgataactcacgcctgtctgaccccggccctgctccgggaggggactgatttaccggaaatgacgataagaccgacgctgatactcggtggtgaggcacccagcgcaacgttgcttcaagccctgagccgtcgggcaacggtgtttaatgcctatggcccgacggaaatcacggtgtgtgcgaccacctggcgttgtccgtcagactacactgagggtgtcattgcgattggacgtccgacagttaacacacaggtttatttgctgaatactgacggccagccggtgccgttaggggcagtcggagagctctatattggtggtatcggggtagcgcgaggctatctcaaccggcctgatttgacggcggaacgttttctggccgatccatttagcgataagccggatgcccgtctgtaccggaccggggatttagcccgctacctgccggatggcaatctggaattcctgggccgtaatgaccagcaggtgaaaatccgcggttttcgcattgaaccgggggaaatcgaagcccgattaatggaacacccggcggtgagcgaagcgctggtgctggctttgaacgatggtcaggataaacggttggtggcttatgtgatggcagaagcggatgaccagttggttaacagcttgcgtgcctatctgagtgccattttaccggattacatggtgccgacagcctttgtacgcctggataccttcccgttgacgccgaacggcaaactggatcgccgggcactgcccgcgccgggggaggaagcttttgcccgtcaggcttatgcagcgccgcaaggggagacagaatctctgttgtctgctgtctggggtgagttgttgggcattgaacaggtgagtcggcatgacagcttctttgctctgggggggcattcattgctggcggtgcggatggttgaacgtttgcgtaatgcggggttaacgttggcggtacgtgatttattccaatctccagtgttatctgaatttgcccaaacagtagggcagtcacaggcggtgatagtgccggcaaatatcatgactcctgcgatcacagcactgacacccgagatgttgccgttgattgatctcactcagtctgagattgaccatattgtggcgcaggtaccgggtggggttgccaatattcaggatatttatggtttgtcaccgttgcaggacggcatcctgttccaccatctgctggcgaataaaggtgacccgtatctatttgttagcaagatggtttttgctgaccgcgccctgttggatagctatttagtggcagtgcaacaagtggttaatcgccacgatatcctgcgtaccgcctttgtttggcaaggattatcagcgccggtacaagtcgtttggcgtcaggcgcaattatcagtcactgaattgacattagacccggttgatgggccggtccgtgatcagttagctcagtattttgacctacatcaccatcgcctcgacttgaaccaagcacctttgttgcactttggggtagcgcaggaggaggatggtcgctggagcgtactgcaattgctgcatcatctgattggcgaccatacgacgctggaagtgatgaacggtgaaattcaggcttatcttgccggacaggaagggaacttacctgtgccgatccctttccgcaatctggtggctcaggcccggttgggggtgagtcaagccgaacatacccgcttctttactgagatgttggctgaggtggatcaaccgacgctgccattcgggttgatggaggtacatcgggatggttctcaggtgacggaatcgtaccggatgttacccgctacattgaatgaccgtctgcgcagtcaggcccagcgtctgggtgtcagtttggcgactttgtgccatttggcctgggcacaggtgttgtcacataccagcggacaggagaaagtggtgttcggcaccgtgttgtttgggcggatgcaggtagggcaaggcgctgacagcggtatggggctgtttatcaataccttgccgttacgactggatataaatgatgcttcggtacaggacagtgtacaggctgtgcatacccggctggcggaattgctggatcatgaacatatgtcactggcattggcccagcgttgcagtagggtgccaggggaaattccgctcttcagtgctttgctgaactatcgacataatgatcaaccgacattcccaaataaagaggtgccaggtattgaattcctaggcgcacaggaacgaaccaactatccgtttgtgctgtcagtagaggacggtgggtctactttgggattgactgctcaggtagtgcagccgtttgagtcggaacgagtatgcggttatatgcaacaggcgctggaaagtctggctgaggcccttgaacagcgtccggagacaccggtacgaacactgaatatcttgccggcagcagagaaaaagctgttgctggaaacttggaatgcaaccgcaaccgaaacgtcgtatccagatcacagttgtattcaccgactgtttgaacaatgggcaaagaaaagtccggatgccacagcactggtgtatgaagaacagatcctcagctatgccaatctcaatgcctgcgccaaccgtctggcgcatcaactgatcgcgttgggagtcacaccggaccaacgggtggcggtttgcgtgtcacgttcaccggcaatggtggcgggggtattagccgtgctgaaagcgggtggagcttatgtgccgctagatccagcttatcctagtgcgcgtttggcacatattctgaccgatgctgccccggctgttgtgctggcggataaggccggcaaggttgcactgggtgaggaagcacttactggactaacggtactggaccccaatattttgcctaaccaagtagacagcaacccgcagatatctggactgacttcgcgacatctggcttatgtgatttatacctccggttccactggggtgcccaaaggggtgatgattgagcaccgcaatacggttaactttctgtattgggcccagcaggcttttgaaacggaagagatccgggaggtgcttttctcgacgtcaatgaatttcgacctgtccatttttgaatgttttgtgccgttgtcccaaggggcgacaattcatctggtggaggatgccctgtcattgatgcagcatgccctgccggtgaccttgatcaactcagtcccgtctgcgatgaaaccgttattgcaggctcaggcgctgatggcgtcggttcataccgttaatctggcgggggaaccgcttaaaggtgccttaattgaacagattttcgaaaaaacgcaaatacaacggttgtgtaatctctatggaccttctgaaacgacaacctattctgcctggttgccaatacagcggggtgacaggattattgaaagtatcggccgtccgatagccaatacccgcctttacttactggacgagaatggtcagccggtaccgttgggcgtggtgggggaaatttatattgggggggcgggagtggcacgtggctacttcaatcgccctgatttaacggcggaacggttcttgattgatccgtttagtgatgtgccggatgcccgtatgtaccgtaccggggatttggctcgttattttccagacggtaatttggagttcctgggccgcaatgaccagcaggtgaaaatccgtggtttccgcattgagccgggggaaatcgaagcccgattaatggaacacccagcggtgagtgaggcggttatactggcactggatgatgatcaggataaacggttggtggcttatgtggtggcagaagcggatgaggtattgattaaccgtctgcatgcgcacttaagtgcggttttaccagattatatggtgccagccgcttttgtctgtctggatgccttcccgctgacgccaaatggcaaactggatcggcgggcattaccagccccaggggaagaagattttgcccggcagatttacgctgcaccgtcaggggagatggaaaccacattggcggctatctggcgtgaattactcggtgttgagcggatcagtcggtatgacaactttttcgcactgggtggtcattcgctgttggcggtgaggatgatgaatcggatagccgcgttggggattgaattaccgctgtccacactgtttacattcccgtctttgatagcttttgctgaagtgatgcgtacccagtttgatgagtcaggcgcggcattgcccgctatcgttccgctatcccgtgaggatcaccaattgccgttgtcatttgcgcaacaacggctttggttcctggcccagcttaatggagtgagtgagacctatcatattccattggccctgcgtttgcgtggtcgattggatatcaccgcttggcaacaggcgcttgatacgctgtttgcccgccatgaagcattgcgttctgtttttgttgctgttgacggccagccacaggtggaattgttgccggcggcatcaagcttgctgatgaaaaaatatgatctgcgtgacacgcctgatgtggatgaccagcttgcgtttctctctgctcaggaagccagtgcgccgtttgatcttgcccgtggcccattaattcgttccagtctggtacaactggctgacgatgaacacgttttcttgctgacccagcatcatattgtttccgatggctggtctttagggatactaaaatcagaattggaggcgctttattcggctcacttgaatcaacagccggatccgttgccaccgttgacaattcagtaccctgattacgccgcctggcagcgtcaatggttgtcggctgaacgcatacagtcccaatctgattattggcgcgcgaggctggttgatgcaccggttctcctggatttgccgactgaccggccacgtccgcctcagcagtcgtttgccggggccttattgcccgtcaatctggatgcggagttaacccaatcccttaagcgcctgagtgagcaacagggtgtcacgttgtttatgaccctgttggcggcctggacagcagttctatcgcgcctgtcaggtcaggaagatttggttgtcggtacgccaagcgcgggccgtagtcggcaggaagtagaatctttaatcggtttctttgtgaatacgctggcgttgcggatggatttatccggtgcaccgaatgtgacggaattgctggcgcgcgtacgacaaactgcactggcggcacaggaacatcaggatctcccgtttgaacaggtggtggaaattgtgcaaccgccgcgccgactagcgcatactccgctatttcaggtgatatttgcctggcagaacaatgaaaacatagaatggcggttgccagggttggcggtttcacttgcggatcaacctattgatatcgctaagtttgatcttgaattgagcctgtctgaagtggacggcagagttgtcggttatctgaattatgctacggcgctatttgatcaagcgaccattgagcggcaggtgggctatctccataccgtattgcgggggatggcaactaaccctcaacagccggtcgggaaaatcgatatcctgaccgtgacggagcgcaagttgttattggaaacttggaacgcgaccaaaacgtcgtatccagatcacggttgtattcaccgactatttgagcaacaggcagagaaaacccctgatgcgatagcgctggtgtatgaaaaatacattctcagttatgccgaattaaatgcccgtgctaatcggctggcgcatcaactgataacgttgggagtcgcaccagagcagcgggtggcaatttgcgtcgcgagttcgccggcgcggatagtgggactgctggcagtactgaaagctgggggtgcctatgtaccgctagacccggcttatccgggggaacgtctgattcatattttaaccgatgctgcccccgctattgtactggcagataatacgggacgtgccgcgttaggcgaaaaagtgctggcagcgttaactgtactggatccgaatagcttgcctgatcaaccggatagcaacccgcaagtaccggtattaaccccacatcatctggcgtatgtgatttatacctccggttcaaccggcataccaaagggagtgatggttgaacattgtgggctggttaacctggttcaggaaaaaatcgttcagtttgatattcatccgggtagccggatgttgcagtttgcctcatttggctttgatgcgggtgtctgggaaaccatgatggcattgtgcagtggggccactttggcgatcccggctgatacggttcgtcaggagccccgttatctctggcattatctggaagagcgggcgataacccatgcctgcttgacaccggccctgctccgggaggggaccgatttaccggaaatgacgataagaccgacgctgatactcggtggtgaagcacccagtacaacgttgcttcaagcactgtgtcgtcgggcaacggtgtttaatgcgtatggcccaacagaaattacggtgtgtgcggccacctggcgttgtccgtcagactacactgagggtgtcattgcgattgggcgtccgacagctaacacacagatttatttgctgaatactgacggccagccggtgccgttaggggcagttggtgagctctatattggtggtatcggggtagcgcgaggctatctcaaccgacctgatttgacggcggaacgttttctggccgatccgtttagcgataagccggatgcccgcctgtatcggactggggatttagcccgctatctaccggatggcaatctggaattcctaggccgcaatgaccaacaggtgaaaatccgtggtttccgcattgaaccgggagaaatcgaggcccgattgttggagtacccagcggtgagtgaagcgctggtgctagctttaggtgacggtcaggataaacggttggtggcttatgtagcagcagaagcgaatgaagagttggttaaccatctgcgtactcacctgagcgccattttgccggattacatggtaccggcagcctttgtacgtttggatgccttcccgttgacgccaaatggcaaactggatcgccgggctctaccagcgccgggggcggaagcctttgcccgtcaggtttatgcagcgccgcaaggggagaccgaaaccctgatggctgctatctggagcgagttgttgggcattgaacaggttagtcggcatgacagcttctttgccctaggtggtcattcattgctggcggtgcggatggttgaacgtctgcgtaatgcggggttaacgctggcagtacgtgatttattccaatccccagtgttatctgaatttgcccaaacagtagggcaatcaccggtggtggtggtgccggcaaatgtcattaccccggcgctcacaacacttacacccgaaatgttgccattgattgatctcactcagtctgaaattgaccatatcattgaacaagtaccgggtggggtggccaatattcaagatatctatgccctgtcaccattgcaggacggcatcttgttccaccatttgctggcgaataaaggtgacccatatctattggtcagccaaatgatttttgctgatcgttcgttgttggatcgttatctggcggcagtgcaacaggtggttaatcgccacgatattttgcgtaccgcctttgtttggcaaggattatcagcgccagtacaagtcgtttggcgtcaggctcaattgtcagtcacggaactgacattagacccggttgatgggccggtccgtgaccaattagctcaacattttgacccacgccatcatcgcctcgacttgaaccaagcacctttgttgcattttgcgatagcgcaggaggacgatggtcgctggagtgtactgcaattgctgcatcacctgattggcgaccatacgacgctggaagtgatgaacggtgaggttcaggcttatcttgcaggacaggaagagagcttgcctgcgccagcccctttccgcaatctggtggctcaggcccggttgggcgtgagtcaggctgagcatacccgcttctttactgacatgctggcagaagtggacgaaccgacgctgccgttcgggttgacggaggtatatcgggatggttcgcaggtgacagaatttcaccgaatgttacctgctacgttgaatgaccgcctgcgcagtcaggctcggcgtctggacgtcagtttggcgactttgtgccatttggcctgggcacaggtgttgtcgcgtaccagtggacgggaacaagtggtgttcggcaccgtgctgtttgggcggatgcaggctgggcaaggcgctgatagtggcatggggctgtttatcaataccttaccgttacgattggatatggatgagacctcggtgcaggacagtgtgcggttagcccatacccggttagccggattgctggagcatgaacatgcttcactggcactggctcaacgttgcagtggggtattgggggaagtgcctctctttagcgcgttactgaactaccggcatagtacgcagccggttaccacggatgcaatcatcagcggtattgaattccttagcgagcaagagcgcactaactatccgtttgtcttgtcggtagaggattttggtcatgcactggggctgacgacgcaaattgttcaaccgattgatccagagcgaatatgtggttatatgcaacaggcgctggaaagtttggtggaagcacttgaacaggcaccggaaacaccgatacgggcattgaatatcttgccagcagcggaaaaaaggttgttgctggagacttggaatgcaactcaggcgccatatcctgaccaatgttgtgttcaccagctatttgaacaacaggcaggaaacacgcctgatgcgatagcgctggtgtatggagaacacattctcagctacgccgaattaaatgctcgtgccaactggttggcacactggttaattgggcaggggatccagccggatgaccgggtcgctgtgcagttagaacgttctattgaactggtggtggctcaattggctatcctcaaggccggggctgtttatgtaccgatcgatccccgcgtaccggatgaacggaagcactggctgataagcgactgtgcagccaaattattgcttacggatatcccggttgacttggccgataagatcggcgctatcagtggggaagattaccccaatcctgacttgccccgcatcagtactgagctggcttatattatgtatacctccggctcgactggtaccccaaaaggggtgttggtaccgcatcgtgcggtggcccggctggtcatcaataatggttatgccgaaatcggaccagatgatcgggtcgcgtttggagctaacccgtctttcgatgccagcacctttgaagtttgggctcctttgctgaatggtggtacgttggtggttattgatcatgccactgtgctaacgcccaaagagtttgccctggcattacagacttatcgcattactgtgttgtggttaagtgtcgggctatttaaccggctggtagcagagttgtccccggttctcccgcagctcaaaatcctgattgtcggcggtgatgtgctagatcctcatgtgatggcgcaagttctacgtgataacccgccgcaacagttattaagtgcttatggacccagtgagggcaccacctttaccaccacctactgtattacagcgttaccgtcggtagtggcgagaatccccattggccggccgatagccaatgcacgcatttatctgctggatacttacggtcagccggtaccgttgggtgcgatcggtgagatttatgtggggggagatggggtcgcttgtggctatcttaatcgtcctgaccagactgctgagcgtttcctgacagatccatttagtgatcaaccggatgcccgtatgtacaggactggggatctggcccgttatctaccagacggtaatttggaatttctgggccgtaatgaccaacaggtgaaaattcgcggtttccgcattgaaccgggggaagttgaagcccgattgctggaacacccggcagtgcatgaagcggttgtgctagtggtggatgacggtcaggacaaacggctggtggcttatgtggtggcagaagcggatgagatgctggttaaccatctgcgtgatcacttaagtgcggtgttgccggattatatggtaccggctgcttttgtctgtttggatgccttcccgctgacgccgaacggcaagctggaccgtcgggcgctaccggtaccgggggaagaagattttgcccggcaaatttacgctgtaccgtcaggggaaatggaaaccacattggcggctatctggcgtgaattattgggtgttgagcggattagccggtatgacaactttttcgcactgggtggtcattcgctgttggcggtgcgaatgataaaccggatagcggctttggggatcgaattaccgctgtctacgctgtttacattcccgactttgatggcttttgctgaagtgatgagtgcccggtttgatgagtcaggcgaggcattgccagctatcattccgctatcccgtgaaggccaattgccgttgtcatttgcgcaacagcgtctgtggctcctggcgcagtttgagggggtgagtgaaacctatcatattccgctggctctgcgtttgcgtggtctgctggatatcgccacctggcaacaggcgcttgatacgctgtttgcccgtcacgaagcgttgcgctctgtttttgttgctgttgacggccagccgcaggtggaattgttgccggcggcattaggttggccgatgaaaaaatatgatctgcgtaacacacctgacgtggatgcgcagcttgcctctctctctactcaggaagctggtacgccgtttgatcttgcccgtggtccattaattcgttctgctctggtacaactggctaatgatgaacatgtcttcctgctgaccctgcatcatattattttcgatggctggtctgtcagcgtattgatgtgtgaattgaacgccctttataccgcttttcttaccgggcaaccggatccgttgtctccgttgacgattcagtatcctgattacgccgcttggcagcgtcaatggctatcggctgaacgcatacagtttcaatctgattattggcgcgcgagactggttgatgcaccggttctactggatttgcctactgatcggccacgtccacctcggcagtcatttaccggaaatatcttgcccgtcagtctggatgcggagttaacgcaatcccttaaacgcttgagtgagcaacaaggtgtcacgttatttatgaccctgttagcggcttgggcgacggttttatcgcgcttatcaggtcaggaagatctggttatcggtacgccgagtgccggtcgcagtcggcaagaagtggaatccctgattggtttctttgtgaatacactggcgttgcggatggatttatccggtgcaccgaatgtaacagaattgttggcgcatgtgcgacaaactgcattggcggcccaggagcatcaggacctaccctttgaacaggtggtagaaatcgtgcaaccgctgcgccgattagcgcatactccgctatttcaggtgatatttgcttggcagagtaatgagaatgcggaatggcaattgccgggactgacggttttacctgccgatcaactcatcgatatcgctaaatttgatcttgaattgagcctatctgaggtggacggaagaattgtcggttatctgaattatgccactgctctatttgatcaggcgaccattgagcggcaggtgggttatctccataccgtattgcgggcgatggtggctaaccctcaacagccagtcgggaaaatcgatatcctgactgtagcggaacgtaagctgttattggaaacctggagcatgaccgaaacgtcgtatccagatcacggttgtattcaccgactatttgagcaatgggcagagaagaatccggatgctacggcactgatgtatgaagggcaagccatcagttatgccgaattaaatacgagtgctaatcggctggcgcatcaactgattacgttgggtgtggtgccggatcagcgagtggcgatttgtgtggcgcgttcaccagcaatgatagtcggattgttagcggtgctgaaagcgggtggtgcttatgtgccactggatccggcttattcgggcgagcgtctggggcatattctggttgatgccaaaccggctattttgttggcggataatactggacgtgctgcgttgggtgagaaagcacttgcagacttgattatgctcgatccgaatatcctgtttgaccaagcggacagtaatccgctgatacctgaattgactgaacgacatttggcctatgtggtttacacctcgggttcgactggcacgccgaaaggggtgatggtggaacatcgtggggtagttaacttggctctggctcaaattacccggtttagcgttgatgaaaccagtcgaatattgcaatttgcctcatcgggttttgatgccagtgtctcggagatcatgacagcgttaagtggcggggcctgtttggttattcctaccgatattatccgccaggacccgcgtcgtctttggtcttatctggaaaaacaagcagtaacgcacgctttcctgccaccggctctgttccgggaagagagcgatttaccggtaataacgataaagcctacgttaatatttgcaggagaagcaccgggttcaaccctgttccgggcgttgtgtgatcgggtaaatttgttcaatgattatggcccgacggaaattacggtttgcgccacctcttggtcttgcccatcagactatacggatgcatgggttcctattgggcgcccaacaaccaacacacgggtttatctgctggatacttatggtcagccggtaccattggggacggtgggggaactgtatatcggtggcgtaggtgtcgcacgtggttatctcaattatcctgagttgactgctgaacgtttcctaactgatccgttcagtaatgaacctgatgcccgcttgtatcgcaccggggatttggctcgttacctgccggacggcaatctgatattcgttggtcgtaacgatcaacaggttaaaatcagggggttccgtattgagccgcaagaaattgaagcgcggctgatggagcatcctgcggtaagtggagcattggtactggcgttaagtgacgggcaggacaaacggctggtggcttatgtagtggcagagccagatgacggattgacggcgagcttgcgtggatatctgagtgctattttgcctgattatatggtgccggccgcttttgtacgcctgaataccttcccgctgaccccaaacggcaagctggatcgccgagcattacctgcgccgggggcggatgcttttgcgcgtcaggtttatgccgcgccgcaaggggaaacagaaatcctattggccactatctggagcgagttgttgggtattgaacagattagtcggcacgacagcttctttgccttgggcggccattctctgcttgcagtgcggatgattgaacgtctgcgtaatgcgggattaacgctggcggtgcatgatctattccaatccccggtgttatcggcatttgccgaaacagtagggcagtcacaagcggtggtggtgccggagaatgttattaccccggcgaccacggcactcacacctgagatgttgccgttgattgagctgacccaaactgagattgactatattgtgcaacaaatgccgggtggaatagttaatattcaggatatctatgccctgtcgccgttacaggacggtattctgttccaccacttattaaccaatgaaggcgacccgtatctgttagtcagccagatggcctttgctgatcgttcgttgctggatagttatctggtggcggtgcaacaggtggttaatcgccacgatactctgcgtaccgcctttatttggcaaggattatctgcaccggttcaggttgtttggcgtcaggcaccgttatcagttgtggaactgatattagatcctgctgacggaccggtttatgagcaattggctcaacgttttaatccgcgtcagcatcgtctcgatctgggccaagcgccactgttacgttttgttattgcacaggaaatggatggtcgttggattgcactgcaattacagcatcatttgattggcgaccatacgacactggaagtgatgaaccgcgaagttcaggcgtaccttaccgggcaggaagagagcctgcctgtgccggcccctttccgcaatctggtggctcaggttcgtctgggggtgaatcaggccgagcatacccgcttctttactgacatgttagctgaggtggatcaaccgacgttgccattcggattgacggaagtacatcgggatggttctcagatgacccaatcgtaccgaatgttgcccgccatactgaacaaccgcttgcgtagtcaggcccggcgtctgggtgtcagtctagcagcgctgtgccatctagcctgggcacaggtattgtcgcgtaccagtggacaggagaaagtggtattcggcaccgtattgtttggacggatgcagacagggcaagggactgacagcagtatggggctgtttatcaataccttgccgttacggctagatatggatgataccccagtacgagggcgtgtacaggcagcacacgcccggctagccgagttactggagcatgaacatgcttcactggcgatggctcaacgttgcagtgggatacaaggtgaagttccactctttagtgctttgttgaattaccggcatagtgcgttatccgcgacttcgaatgaaatcatgaatggtgttgagtttcttggcgcgcaggaacgtaccaactatccgtttactctatcggtggaggattttggtaatgcgttggggctaacaacgcaaattgtccagccatttgatccggaacgggtgtgcggttatatgcaacaagcgctggaaagtttggcagaaacacttgagctggccccggaaacgccggtacggacgttggaaattttgcccgaggctgaacgcactttgttattaaaaacctggaatgagacagaaattgcctattctgacccgctgtgtatccatcaattatttgaacaacaagtggagaaaaacccggacgccacagcactggtgtatgaagaacagacgtacagctatgcggaactgaatacccgcgctaaccgactagcccatcaactgattgcgctgggtattgtgccagaccagcgagtagcgatttgcgtgacacgttcaccgacgatgattgtgggcttgctggcggtgttgaaagcgggtggtgcctatgttccattggccccggcttatccaggggaacgtttggcacatattttgaccgatgcagcaccggctattttgctggcggacaatgtcggatgtgccgcattgggtgaggaagcactgtcaggactcacggtactggatccgaatacgctgcctgataagccggacagtaacccgcaagtgaccgcactgactgcacagcatctggcgtatgtgatttacacatcaggttcaaccggtacaccaaaaggtgtgatggttgagcatcgtgggctaatcaatcttgtccgggataaaattgcccagtttgacattcactcagatagccggatattgcagtttgcctcattgagctttgatgccagtgtttgggaaatcatgatggcgttgggaagtggggcctgtctggttatcgcagtcgatatcgtccggcaggacccgcttcgtctctggcattatctggagcaacaggtagtgacccatgcctgtctgaccccggctctgcttcgggatggaggagatttaccggcgctaacgataacaccgacagtgatattaggcggtgaagcacctagcgcagcactatttcagacactttgtcgccgggcggcgctgtttaatgcctatggcccgacagaaatcacggtgtgtgcggcgacttggcgttgtccaccagactacacggatacgttagtgcctatcggccatccgacggcgaacacccagatttatttgttgaatagcgacggccagccagtgccgttgggggcagtaggtgagttgtatgtcggtggtgcgggggtggcgcgtggctaccttaatcgtcctgaactgacggctgaacgctttttagctgacccatttagtgagatgccgggtgcgcggatgtatcggaccggcgatttggcccgttatctgccagatggcaatttagtatttgttggtcgtaatgaccagcagattaaaattcggggcttccggattgaaccgggtgaaatcgagacccggttgacagagtaccctgcggtacgtgaagcggtagtgttagcgcggggtgaggagcatgataagcgtctagtggcttgggtggtggcagaagaaaacgatgaattggcgaatagcctgcgtactcatctgagcacaattttgccagattatatgatgccggcggcttttgtccgtttggatgcactaccgttgacgccgaatggaaagctggaccgtctagcgttaccggcaccggacgaagaagccttttcccgccagatttacgaagcgccacaaggcgaaacagagatagcactggccgctatctggcgtgagttactggggattgagctggtgggacggtatgacagtttctttgctctgggcggccattcgttattggcggtgaggatgataaaccgaatggcggctttaggcattgaattgccgctgaccacgttgtttaaatcaccgacgttggcagattttgctgaggtaatgagggctcagcttggtgaacagaacaatagtgtgtctgctatgctgccgatatcccgagagggtgcattaccgctgtcatttgctcaacagcgtctatggctcctgacccaatttgaaggggttagccagacttatcatgtcccaatggctctgcgtttacatggtcagttggatatcgctgcttggcagcaggcgctgaatcgcttgtttgcccgccacgaggctttgcgttccatctttatctcggaggatggtcagcctcaggtcgaattgttgccggctgaattgggtttgccgatgagcaaacacgatttgcgtaaagtgtttgatgcagataaacgacttgagcgtttatgtgtacaggaagcggaggtgccgtttgatcttgctggtggtccgttaattcgagcgggtttgatacaacgtgctgacgatgattatgtctttttgctgactcagcatcatattgtgtcagacggctggtcggctggcgtgttgatgcatgagttgagtgccctctataccgctttttcaatggggctgccagatccgttacctccactggcaattcagtatcctgattatgctgcctggcagcgtcagtggctgtcggcggagcggttacaaatccaatctgactattggagaatgagtctggcagatgcgccagttctactggatttgcctactgatcggtcacgtccatctcagcagtcgtttgccggggctttattacccgtcaatttggatgcggagttaacccaatctcttaaacgtttgagtgagcaacagggagtcacgttatttatgacgttgctggctgcttgggcaacagtcttatcacgcctatcaggccaggaagatctggttatcggtacgccgagtgccggtcgcagtcggcaggaagtggaatccctgatcggcttttttgtgaatacactggcgttacgcatggatttatccgattcccccaatgtggcggaattgctggcgcgagtgcgacaaactgcgctggcggcacaggagcatcaggatctcccgtttgaacaggtagtggaaattgtacaaccaccacgccacttggcacatactccgctgttccaggtgatgtttgcttggcagaacaatgaaggcatggaatggaagatgccgggactgacggtttcacctgccgagcaacgcattgatatcgctaagtttgaccttgaattgagtctgtctgaagtagacggccgaattgtcggttatctgaattatgccaccgccctgtttgatcaacttaccattgagcggcaggtgggctatctccataccgtactacgagagatggcggctaaccctcaacagccggttgggaaaatcgatatcctgaccgtggcggaacgcaaactgttgctggaaacctggaatgcaacccagacgcgatatcctgaccagacatgcattcatcggttgtttgaacaacaggaggagaaaacccctgacgcagtagcgctggtgtatgaagaacacattctcagctacaccgaattaaatgctcgcgctaaccgattggcgcgccagttaattaagtgggggatacggtcagatgagcgggttgctgtgctgttagaacgttccattgagctgatcgtggcccaattggcaattctcaaagccggggccgtttatgtgccaatcgatccccgtgtgccggacgaacggaaaaactggctgataaacgactgttcagccaagttattgcttagcggtatcccggttgatgtggcgatcccccggttttctctaactgatgagatgatcactatcgaagaagaagatcaccgcaatcttgacttgcctcgctccagtaccgacttggcctatatcatgtatacctctggctcgaccggtacacccaaaggggtaatggtgccgcatcgtgcggtggttcgactggtcatcaataacgggtacgctgaaatcgggccggatgatcgggtggtgtttgaggccaacccggctttcgatgccagtacctttgaagtctgggcaccattgctcaatggcggtacgctggtggtgattgatcacactacgttactgacgcctaaagaatttgttcaggcattacagacttatcgcattaccgtactatggctgagtgtcgggctgtttaaccgactggcgacagcgttgttcccagtgctgccacaaatcaagaccctgattgtcggcggcgatgtgctggatccgcatgtgatggcgcaggttctgcgtgatagcccgcctcaacagttattaaatggttatggaccgagtgagggcaccaccttcactaccacctaccgcatcacggcattatcaccggaagtgagccggatccccattggtcgaccgatagccaatacgcgggtttatctgttagatacctatggtcagccagtgccacagggggtaactggtgagatttatatcggtggagatggggttgcctgtggttatctcaatcgccccgaactgaccgcggagcgttttctgccggatccgtttagtgataaaccggatgcccgcctgtatcggaccggggatttggcccgttacctgccagacggcaatctggagtttctgggccgcaatgaccagcaggtgaaaatccgtggtttccgtattgaactaggggaaatcgaagcccgattgctggaatacccgttcgtgagtgaagcggttgtgcaggtgatgggcgacggtcaggacaaacggttgatagcttatgtggtaacagaagcggatgaggagttagttaaccgtctgcatacccacctaagtaccattttaccggattatatggtgccgacggcctttgtacgtctggatactttcccgttgacgccgaacggcaaattggatcgtcgggcattaccggcaccgggggaggaagcttttgcccggcaagtttatgaagcaccgcagggagaaacagaaatcctattggctgctatctggagcgagttgttggggattgaacagatcagtcggcacgatagtttctttgccttgggcggccattctctgcttgcggtgcggatgattgagcgcctgcgtaacgtggggttaacgctggcggtacgtgacctatttcaatctccgatgttatcggcatttgcccaaacagtaggccaatcacctccggtggtggtgccggcgaatgtcatcaccccggcgaccacggcacttacacccgaaatgttgccgctgattgagctgacccagcttgaaattgaccatatcgtgggacaagtgccgggtgggatggctaatattcaggatatctatgccctgtctccgttgcaggacggtattctgtttcaccatttgttggccaatgaaggtgacccgtatctattggtcagccaaatgacttttgatgatcgcgccttgttggatcgttatctggcagcagtgcaacaggtagtgaatcgccacgatattctgcgtaccgcctttgtttggcaaggattatcaacgccggctcaagtggtttggcgtcaggcaccattatcagtcactaagctgacattggacccagttgatgggccggtccgtgaccagttagctcaactttttgatccacgtcgctatcgtattgatctgcaacgagccccattgttgcactttgtggtagcacaggaggaggatggccgttggagcgtactgcaattgctacatcatctgattggcgaccataccacaatggaagtgatgcatggcgaagttcaggcttacctagtcggacaggaagagaacttgcctgtgccagttcctttccgcaatctggtagctcaagttcgtttgggggtgagtcaagccgaacatacccgcttctttactgacatgttggctgaggtggatgaaccaacactgccatttgggttgacggaggtacatcgggatggttcgcaggtgacggaatcgcaccggatgttacctgttaggttgaacgatcgtctgcgcaatcaggcccggcgtctgggtgtcagtttggctacgttatgccatctggcttgggcacaggttttatcacgtaccagcgggcaggataaagtggtgttcggtaccgtgctgtttgggcgaatgcaggcagggcaaggaggtgacagcagcatggggctgtttatcaataccttgccgttgcgactggatatggatgataccccggtgcaggaaagtgtacgggcagctcattctcggttagctggattgctggagcatgaacatgcgtcactggcgctggctcaacgttgcagtggaataccgggggaagcgcctctctttagtgctttgctgaactaccggcatagtgcacaaccggttaccacggatgcaaccatcagcggtattgaatttctcggcgggcaagagcgcactaactatccgtttgtcttgtcggtggaggatgttggtcatgctttaggattgacggcgcaaattgctcaaccgattgatccggaacggatatgtgattatatgcagcaggcgctggagagtctggcagtggcgcttgaacagcatccagagataccggtacgaacattgaatattttgccaacagcagagaaaaagctgttgctggaaacctggaatgcaactgaaacgtcgtatccagatcacggttgtattcaccaactgtttgagcaatgggcagagaaaagtccagatgccacggcactggtgtatgaagaacagagtttcagctatgccgagctcaataaccgcgccaaccgtctggcgcatcaactgatcgcgttgggcgtcataccggaccaacgggtggcggtttgcgtgtcacgttcattggcaatggtggtaggggtattagccgtgttgaaagccgggggtgcctatgtaccgctggatccggtctataccggtgagcgcctgacacatatcctgaccgatgctgcccccgctattttgctggcggataatgtcgggcgtgatgtgctgggagaggacgcactggcagggttaacggtacttgacccaaatagcccgcctgatcaaccggacagtaacccacaagtgccggcattgacggcacagcatctggcgtatgtgatttacacctcgggctcgaccggcacgccgaaaggggtaatggtggaacatcgccatatcctgcgtttgtttgaggcgactgaattttggtatcactttaatcggcaagatatttggtgcctgttccactccattgcgtttgacttctcggtgtgggaattatggggggcgttacgttacggtgctaaattagtgctggttccgcacgcgattgcccgttccccccaggagctgcatcaattcgtgtgtcagcatggcatcacagtgttgaatcagacccccagtgcctttaaagcctttattgccagctatatcgccaatccgttaccggactgcttgcgctatatcatctttggtggggaagcactcgatccgagtattttgaagccgtggtatgccctgcgtgaggagacgttgccgcagttggtgaatatgtacggtatcacagagaccacggttcacgtcacttaccgggcactggctcgccatgatgtagaacagataacgagtcctattggcacacggatcccggacttaactctctatctgctggataagtatagtcagcctgtaccgttaggtgccgtgggtgagttatatattggcggggccggtgtggcacggggttatctcaatcgtcctgaactgacggcggagcgttttctaccagatccgttcagtagtgagccggatgcccggatgtaccgcaccggggatttggcccgctatttgccagatggcaatttggcgttcctgggccgaaatgaccaacaggtgaaaatccgcggtttccgcattgagccgggggaaatcgaagcccgattgacggaacacccggcagtgcatgaagcggttgtacaggtgatgggcggcggtcaggataaacggctggtggcttatgtagtggcagaagtggataaggagttgattaatcgtctgcgtactcacttaggtgcgattttaccggattatatggtgccggcagcatttgtctgtatggatgccttcccattgaccccgaacggtaaactggatcgtcgggcgctaccggtgccgggggaaaatgcctttgcccgtcaggtttatgcagcgccgcaaggggagacagaaactctgctagccactatttggagcgagttattgggtattgaacaggtgagtcggcatgacaacttctttgcattgggtggtcattcgctgttggcggtacggatgattgaacgtctgcgtaatgcgggattaacgctggcggtgcgtgatttattccaatccccggtgttatcggcatttgcccaaacagcaggacaatcactggaagtggtggtgccgacgaatgtcattaccccggtgaccacggcactcacacctgaaatgttgccgttggctgatctgacccaatctgagattgatcatatcattgcacaagtatcaggtggggttgccaatattcaggatatctatggcttatcaccgttgcaggacggtattctgttccaccatttactagcgaataaaggagatccgtatctgctggctggtcagatggtctttgctaaccgcgacttgttggacaactatttggcggcagtacaacaggtagttaatcgccacgatattttgcgtaccgcctttgtttggcaaggattatcagcgccagttcaggtggtttggcgtcaagctcaattatcagtcactgaactgacactagacccggttgatgggctggtctgtgaccagctagctcaacattttgatccgcgtcgctatcgtattgatctgcaacgagcaccactgttgcattttgcggtggcgcaggaggacgatggccgttggagcgcactgcaattgcagcatcatctgattggtgaccataccacaatggaagtgatgcagggcgagattcaggcttatcttgccggacaggaagagaacttgcctgtgccggtccctttccgcaatctggtggctcaggcccggttgggggtgagtcaggccgcacatacccgcttctttactgacatgttgtctgaagtggatgaaccgacgctgccgttcgggttgatggaggtacatcgagatggttcacaggtgatggaatcgcaccagatgttaacgcctgaactgaatgatcgtctgcgcagtcaggcacggcgtatgggtgtcagcttagcaactttatgccatctggcctgggcacaggtcttgtcgcgtaccagcggacaggtaaaagtggtattcggcaccgtgctgtttggacggatgcaagcaggacaaggggctgacaatggcatggggctatttaccaatactttgccgttgcgactggatatggatgataccccggtgcgggacggtgtacgattagcccatactcgattagccgaattgctggagcatgaacatgcctcactggcgctggcccaacgttgtagtgaggtgccgagggaaacacctctctttagcgcgttactgaactaccggcatagtgcacagccggttaccacggatgtaaccatcagcggtattgaattccttagcgggcaagagcgcactaactatccacttgtcttgtcggtggaagattttggtcacgcactggggctgacggtgcaaattgttcaaccgattgatccgaaacgcgtgtgtggttatatgcaacaggcgctggaaagtctggcagcggcgcttgaacagcagccggagacaccggtacggttgctgaatatcttgccggaagctgagaagaggttgttactggcaacttggaacgcgactcaagcaccatatcctgaccagagttgtattcaccggctgtttgagcaacaggcagaaaatacccctaatgcgatagcgttggtgtatggaaaacatattctcaactatgccgaattaaatgctcgcgctaaccaactagcccactggttaattgggcaaggggtcaagccggataaccgggtcgctgtgctattagaacgttctgttgagctggtggtggctcagttggctatccttaaggctggggctgtttatgtgccgattgatccccgagtgccggatgagcggaagtattggttgataagtgactgttcagccaagttattgcttaccgatactccgattgacttggcgatcccccggttttgcctggccgatgagatgggtgctattaggcaggaagataaccgcaatcctgacttaccccgttccagtactgaactggcctatatcatgtatacctcaggctcaacgggcacgcccaaaggagtgatggtaccgcatcgggcagtggttcggctggtgattaataatgggtacgccgaaattgggccggatgatcgggtggcgtttgaagctaacccggcttttgatgccagcacctttgaagtctggtcgccgttgcttaatggcggcgtgctggtggtgattgatcacgccacgttgctgatgcctaaagaacttgttcaagcattgcagactcatcgcattaccgtgctgtggctaagtgtcgggttatttaaccgactggcggcagagttgtctccggctttcccccagctcaaaatcctcattgtcggcggtgatgtgctggatccacatgtaattagacaagttctgcgtgataacccaccgcaacagttattgaatggctatggaccgagtgaaggcaccacctttactaccacttaccgtattacagcgttatcgccagaagtggtgagaattcccattggtcgaccaatagccaatacgcgggtttatctgttggatacttatggtcatccagtgccgcagggggcaatcggtgagatttatatcggcggagatggagttgtttgtggctatcttaatcgtcctgaactgacgaaggaacgttttttgccagatccgttcagtgatgaacccaatgctcgcctgtatcgcaccggggatttagctcgttacctaccagacggtaatctggaattcctgggccgcaatgatcaacaggtgaaaatccgcggtttccgcattgaaccgggggaaatcgaagcccaattgctgaaacacccggcagtaagcgaagcgttggtgctgactttgggtaacggtcaggataaacggttggtggcttatgtggtggcagaagcggatgagatgctggttaaccatctacgtactcacttaagtatgattttaccggattatatggtgccggcagcctttgtgcgtttggatacctttccgttgacgccaaacggcaaactagatcgccgagcattaccggtgccgggggaagaagattttgcccggcagatttacgccgcaccgctaggggagatggaaaccctattggcgactatctggtgtgaattactcggtgttgagcgaattagccgatatgacaactttttcgttttaggcggccattcgttgttagcagtgcgaatgatgaaccggatagcggcgttggggattgaatggccattgtccacgctgtttacattccctgttttgactacttttgctgaagcgataagtgcccagtttggggaatcggacaggatattacctgctatcgttccgctatcgcgtgaaggccaattgccgctgtcatttgcgcaacaacgtctgtggttcctgactcagtttgacggggtgagtgagacctatcatattccgctggccttacgtctacatggtcggttggatatcgccgcttggcaacagacacttgatacactgtttgcccgccatgaagcgttgcgctctgtcttcgttgctgtcgatggtcaaccgcagatagagttgttgccggcggcatcaggcttgctgatgagaaaatatgatctgcgtgacatgcctgatgtagatgcgcagcttgcgtctctctctgctcaggaaattgaaacactgtttgatcttgctcgcggcccattaattcgttccagtctgatacaactggctgatgatgatcacgttttcttgctgactctacatcatattgtttttgatggttggtctgtcagcgtgttgatgcgtgaattgagctccctttacaccgcgtttctggcgggacagccagatccgttgccaccgttgacgattcagtaccctgattacgccgcttggcagcgtcaatggttgtcggctgaacgcatacagtcccaatctgattattggcgcgcgaggctggttgatgcaccggttcttttggatttacctactgaccggccacgtccgcttcagcagtcgtttgccggggccttattgcctgtcagtctggatgcggagttaacccaatcccttaagcgcctgagtgagcaacagggcgtcacgttatttatgaccctgttggcggcttgggcgacagtgctgtcacgcctgtcaggtcaggaagatctggttatcggtacgccaagtgctggtcgtggtcggcaggaagtggaatctctgattggcttctttgtgaatacgttggcgttgcggatggatttatctgatgcaccgaatgtgacggaattgctggcacgtgtacgacaaaccgcactggcggcacaggaacatcaggatctcccgtttgaacaggtggtagaaatcatgcaactgccgcgccaactggcgcacaccccgctgtttcaggtgatgtttgcctggcagaacaatgagaatacggaatggcggctgccggggctagaggtttcaccagtcgagcaagtttttgatgtggctaagtttgatcttgagctgaatttgtttgaagttgaaggccagattgtcggttacctgaattatgctacggcgttatttgatcaagcgaccattgagcggcaggtgtgctatctccataccgtattgcgggggatggtagctaaccctcaacagccggtcgggaaaatcgatatcctgaccgtggcggagcgtaagctgttactggaaacttggaacgcaactgaaatgccgtatcctgctcactgttgtattcaccggctgtttgagcaacaggcagaaaaaagcccggatgccacggcgctgatgtatgcagggcaagttctcagttatgccgaattaaatgcccgtgctaatcggctggcgcatcaactgataatgttgggagtcgcaccagagcagcgggtggcaatttgcgtcgcgagctcaccggcgcggatcgtgggactgctggcagtactgaaagccgggggggcctatgtaccgctagacccggcttatccgggggaacgtctggttcatattttaaccgatgctgtgccagctattgtgctggcagataatacgggacgtaccgcattaggtgaaaaagtgctggcagcgttaactgtactggatccgaatagcctgcctgatcagccggatagcaacccgcaagtatcggcattaaccccacgccatctggcgtatgtgatttatacctccggttcgaccggcataccaaagggcgtgatggttgaacaccgtgggctggttaatctgattcaggaaaaaatcgttcagtttgagattcatccgggtagccggatgttgcagtttgcctcatttggctttgatgcgggtgtctgggaaaccatgatggcattgtgcagtggggccactttggcgatcccggctgatacggttcgtcaggagcctcgttatctctggcattatctggaagagcaggcgataactcacgcctgtctgaccccggccctgctccgggaggggactgatttaccggaaatgacgataagaccgacgctgatactcggtggtgaggcacccagcgcaacgttgcttcaagccctgagccgtcgggcaacggtgtttaatgcctatggcccgacggaaatcacggtgtgtgcgaccacctggcgttgtccgtcagactacactgagggtgtcattgcgattggacgtccgacagttaacacacaggtttatttgctgaatactgacggccagccggtgccgttaggggcagtcggagagctctatattggcggtatcggggtagcgcgaggctatctcaaccggcctgatttgacggcggaacgttttctggccgatccatttagcgatgagccggatgcccgtctgtaccggaccggggatttagcccgctacctgccggatggcaatctggaattcctgggtcgtaatgaccagcaggtgaaaatccgcggtttccgtattgaacctggggaaatcgaagctcgcttaatagaacacctggcggtaagcgacgcactggtgctgactttgggtgacggtcaggataaacggttggtggcttatgtggtggcagaagcggatgaccagttggttaacaacttgtacgctcatctaagagccattttgccggattacatggtgccggcggcctttatacgcctggataccttcccgttgacaccgaacggcaaactggatcgccgggcactgcccgcgccgggggtggaagcctttgcccgtcaggtttatgcagcgccgcaaggagaaatagaaacccggctggctgctgtctggcgcgagttgttgggcattgaacaggttagtcggcatgacagcttctttgctctgggggggcattcattgctggcggtgcggatggttgaacgtttgcgtaatgcggggttaacgttggcggtacgtgatttattccaatccccagtgttatctgaatttgcccaaacagtagggcaatcaccggtggtggcggtgccgacgaatgtcattacctcggcgactacgaaactgacacccgagatgttgccgttgattgatctcactcagactgagattgaccatatcattgaacaagtgccgggtgggattgccaatattcaggatatctatgccctgtcaccgttgcaggatggcatcctgttccaccatttgctggccagtgaaggcgacccgtatttgctggttggtcagatggtctttgctgaccgcgctctgttggatagctatttagtggcagtgcaacaggtgattaaccgtcatgacatcctgcgcacggcttttatctggcagggattatccacgccggttcaggtggtctggtgtcaggctttattgtcaattactgaactgacattgaacccgattgatgggccggtccgagaccagttagctcaacgttttgatccgcgtcgatatcgtattgatctgaaacgagcacctttgctgcattttgtagtggctcaggaggaggatggtcgctggagtgtattgcaattgttgcatcatttgattggcgaccatacgacgctagaagtgatgaacggtgaagttcaggcttatcttgccggacaggaagagaacttgtctgcgccagtccctttccgcaatctggtggcacaggctcggttgggggggagtcaggctgagcatacccgtttctttactgacatgttggctgaagtggatgaaccaacgctcccgttcgggttgacggaagtacatcggaacggctcacaaatggccgagttgcaccggatgttgacgcctgagctgaataaccgtttgcgtagtcaggcccggcgtctgggcgtcagtttggctgcgttgtgtcatttggcctgggcacaggtcttgtcgcgtaccagcggacaggcgaaagtggtgtttggcacagtactgtttgggcggatgcaggtaggggaaggagttgacagcggcatgggattatttatcaacaccttgccgttgcggttggatatagatgagacctcggtgcaggacagtgtacggttagcgcatactcggttagctgggttgcttgagcatgaacatgcttcgctggcgttggctcaacgttgcagtggagtgcaaaatgaagcaccgctctttagcgctttgttgaactaccggcataatgtaccggcgatagccacggatgcaatcattagcggcattgaattccttagcgggcaagagcgcactaactatccgttggtgctctcagtggaggattttggtgacgcactgggattgacggtgcaaattgttcaaccgattgatccggagcggatatgtggttatatgcaacaggcgctagaaagtctggctgcggcgcttgagcagcagccggaggcaccagtacgattgctgaatatcttgccggcatcggagaaaaaactgttgctggagagctggaacgcgacccaagcaccatatcctgaccaatgttgtattcaccggttgtttgaacaacaggcagaaaacacgcctgatgcgatagcactgatatatggagaacacattttcaactatgccgaattaaatgctcgcgctaaccggttagcgcgtcggttaatcaggcaggggattcaaccggatgagcggattgctgttttgttagagcgttctattgagctggtggtggctcaattggctatcctcaaagccggggctgtttatgtgccgatcgatcccagtgtgccggacgagaggaagcattggctgataagagactgttcagccaagttattgcttaccgatatcccgattgacctggcgattcctcggttttgtttggccgatgagatgggggctattaggggagaggattaccttaatcttgacttatctcggtccagtaccgagctggcttatattatgtatacttccggctcgaccggtatgcccaaaggggtgatggtgccgcatcgtgctgtagttcggctggtgattaataacggatatgccgaaattgggccggatgatcgggtggcgtttgaagctaacccggttttcgatgctagcacctttgaagtgtgggcaccgctgcttaatggcggtgcgctggtggtgattgatcacgccactgtgctaacacccaaagagtttgctcaagtattacggaattatcgcattaccgtgctgtggctgagtgtcgggttgtttaaccgactggcagcagagttgtccccggttttcccgcagctcaacatcttgattgttggtggcgatgtgctggatccgcatgtgatggcgcaagttctgcgtgatagcccgccgcaacagttattgaatggctatggacccagtgagggcaccacctttaccactacctaccgtattgcaacgttaccgtcaggagtgatccggatccccattggccgaccgatagctaatacgcgggtttatctgttggatgccaatggtcagccagtgccgttgggtgtggaaggagagatttatatcggcggggatggagttgcctgtggctatcttaatcgtcctgaactgaccgcagagcgttttttgccggatccgttcagtgataaacccgatgcccgcctgtaccgaactggggatttggcccgttacctgccggatggcaatctggagttcctgggccgtaatgaccaacaggtgaaaatccgtggtttccgcattgagccgggggaaatcgaagctcggctgatggaacacccggcggtgcatgaagcagtcgtgttggtgatgagtgatggtcaggataaacggttggtggcttatgtggtggcagaagcggatgagatgctggttaaccatctgcgtgatcacttaagtgcggtgttgccggattatatggtaccggccgcttttgtctgtttggatgccttcccgctgacgccgaacggcaagctggaccgtcgggcgctaccggcaccgggggaagaggattttgcccggcaaatttacgcagcaccgtcaggggagatggaaaccacattggcggctatctggcgtgaattactgagcgttgagcggattagccggtatgacaactttttcgcactgggcggccattctttgctggcggtgcggatgatgaaccgaatagcggcgctggggattgaattaccgctgtctacgctgtttacattcccgactttgatggcttttgctgaagtgatgagtgcccggtttgatgagtcaggcgaggcattgccagctatcattccgctatcccgtgaaggccaattgccgttgtcatttgcgcaacagcgtctgtggttcctggcgcagtttgagggggtgagtgaaacctatcatattccgctggctctgcgtttgcgtggtcggctggatatcgccgcctggcaacgggcacttgatacgctgtttgcccgccatgaagcgttgcgttctgtttttgttgctgttgacggtcagccgcaggtggaattgttgccgacggaatggggcttgccgatgagaaaatatgatctgcgtgacacgcctgatgtggatgcgcagcttgcttctttctcagttcaggaagctagtgtgtcgtttgatcttgcccgtggcccattaattcgttccactctggtacaactggctgacaatgatcacgtttttctgctgacccaacatcatattgtttccgatggctggtctttaggggtactgaagtcagagctggagacgctgtattcggcttacttgaaccaacagccagatccgttgctaccgttgacgattcagtaccctgattacgccgcttggcagtgtcaatggctgtcggcagcacagatacagtctcaatctgactactggtgcacaaagctggctgacgtaccagttctactggatttaccgactgaccggccacgtccgcctcagcagtcatttgccggaaatactttactcatcagtctggatgcggagttaacccaatctcttaaactcctgagtgagcaacagggcgtcacgttatttatgaccctgttggcggcttgggcgacggttctgtcgcgtctatcgggtcaggaagatctggttatcggtacgccaagtgctggtcgcagtcgacaggaagtggaatctttaatcggcttctttgtgaatacactagcgttgcgtatggatttatccggtgaacccagtgtggcggaattactggcacgtgtgcgacaaacggcgctggcagcgcaagaacaccaagatctgccgtttgagcaggtggtggaaatcgtgcaaccgtcccgccgactggcgcataccccattgttccaagtgatgtttgcctggcagaacaatgagaacacggaatggcggttgccgggattggtggtttcacctgttgagcaagcttttgatgtggttaagttcgatcttgagctgaatttgtttgaggtggagggcaggattactggctatctgaattatgccaccgctctatttgatcaagtgaccattgagcggcaggtaggctatctccataccatgctgcgggagatggtagctaatcctcaacagacggttgggaaaatcgatattctgaccgtagcggagcgcaagctgttattggaaacccggaatgtcattgaaacccggtatcctaagcagttatgtattcatcagttatttgaacaacaggtggagaacgagcctaatgagacggcagtggtatatgaagaacacaccctcagttacggcgagctcaatgcccgtgccaaccggttggcgcatcaactgatcgcgttgggcgtcataccggaccaacgggtggcggtttgcgtgtcacgttcaccggcaatggtggtgggggtattagccgtgctgaaagccggaggtgcctatgtgccgctggatccggtctatactggggagcgcctgacacatatcctgaccgatgctgcccccgctattttgctggcggataatgtcgggcgtgatgtgctgggagaggacgcactggcagggttaacggtacttgacccaaatagcctgcctgatcaaccggacagtaacccgcaagtgccgggattgacggcacagcatctggcgtatgtgatttacacctcgggctcgaccggtacgccgaaaggggtgatggtggaacatcgtcatatcctgcgtttgtttgacgccactgaatcctggtatcgatttaaccggcaagatatttggtgtctgttccattccattgcgtttgacttctcggtatgggaattatggggggcgttacgctacggcgctaaactggtgctggttccgcatgcgattgcccgttcaccccaggagctgcatcaattcgtgtgtcagcacggtgttacggtgttgaatcagacccccagtgcctttaaagcctttattgccagttatgttgccaatccgttaccggactgcttgcgctatatcatctttggtggggaagcacttgaaccgagtatgctgaagccgtggtatgccctgcgtgaagagacatcgcctcagttggtgaatatgtacggtatcacagagaccacggtacacgtcacttactgggcactggctcgccatgatgtagagcagacaacgagtcctattggcacacggctcccggatttaaccctctatttgttggataagtatggtcagccagtaccgtcaggcgctgtaggtgagttatatattggcggggccggtgtggcacggggttatctcaatcgtcctgaactgacggcggaacgtttcctgacagacccgtttagtcatattccagatgcccggatgtaccgcaccggggatttggcccgctacctgcctgacggcaatctggagttcctgggccgtaatgaccaacaggtgaaaatccgcggcttccgcattgagccgggggaaatcgaagcccgattgatggaatacccggcggtgagagaagcggttgtgctggcgctggatgatggtcaggataaacggctggtggcttatgtagtggcagaagtggatgaggagttgattaatcgtctgcgtactcacttaggtgcgattttaccggattatatggtgccggccgcttttgtgcgtctggagacctttccgttgaccccgaacggcaaactggatcgccgggcgctaccggcaccgggggaagatgcctttgcccgtcaggtttatgcagcgccgcaaggggagacagaaactctgttagccactgtttggagcgagttgttgggtattgaacagatcagccgacacgacagcttctttgcattaggcggtcattcattgctggcggtgcgaatgattgaacgtctgcgtaacgtggggttaacgttagcggtgcgtgatttattccaatccccggtgttatcggcatttgcccaaacagtagggcaatcaccggcggtggtagtgccggcaaatgttatcaccccagtaaccacaatactcacccccgatatgttgccattaattgatctcactcaaccggaaattgaccatatcgttgaacaagtgccgggtggaatggctaatattcaagatatttatgccctgtcgccgttacaggacggtatcttgttccatcatctactggcgaataaaggtgatccgtacctattagtcagtcagacggctttcgttgatcgatctctgttggacagttatttggcagtagtacaacaggtgattaaccgccatgacatcctacgcactgcttttatctggcaaggattatcaacaccggttcaggtggtctggcgtcaggcaccgttatcagtgactgaattgacattggatcccattgatggaccggtttatgaacaactcattcaacgttttgacccgcgttatcatcgtctcgacttgagccaagcccccttgctgcgttttatggtggcgcaagaaacggatggtcgctggattgcactgcaattacagcatcatctgattggcgatcatacgacactggaagtgatgaaccgagaagttcaggcgtaccttaccgggcgggaagagaacttgtctgcgccggtccctttccgcaatctggtggctcaggtccggttgggcgtgagccaggccgaacatacccgtttctttactgacatgttggctgaagtggatgaaccgacgctgccgttcgggttgacggaagtacatcgagacggctcgcaggtgacagaattgcaccggatgttgcccaccatattgaataatcgcttgcgtagtcaggcccggcgtctgggcgttagtttggcggcgttgtgtcatctggcctgggcacaggtattgtcgcgtatcagtggacaagagaaagtggtgttcggcactgtgctgtttgggcggatgcagggtggagaaggcgctgatagcggcatgggactgtttgtcaacaccttgccgttacgactggatataaataataccccggtacaggatagtgcacgcttaacccatactcggttagctgaattgcttgcgcatgaacatgcttcactggcactggctcaacgttgcagtgaagtgtcgggggaaacgcccctctttagtactttgctgaactaccggcatagtgcgcagccgatcaccgtagatgaaactatcagcggtatagaatcctttaacgggcaggaacgtaccaactatccgtttactctatcggtggaggattttggtcacgctttgggattgaccgcgcaagtggtacaaccgtttgatccgaaacggatatgtggttatatgcaacaggcgctggagagtttggtggaagcacttgaacaggcaccggaaacaccggtacgggcattgaatattctgccagaagtggaacgccgattgttgctaaaaacttggaatgcgactgaaactgtctaccctaagcagttatgtgtccatcagttatttgaacaacaagtggagaaaaacccggatgctacggcgctggtgtatgaagaacagacgttcagctatgcggaactgaatacccgcgctaaccgactggcccatcaactgattgcgttgggtattgcgccagaccagcgagtagcgatttgcgtgacacgttcaccgacgatggtcgtaggcttgctggcggtattgaaagcgggtggtgcctatgttccattggacccggcttatccgggggaacgtttggcacatattttgaccgatgcagcaccggctattttgctggcggacaatgtcggatgtgccgcattgggtgaggaagcactgtcaggactcacggtactggatccgaatacgctgcctgataagccggacagtaacccgcaagtgaccgcactgactgcacagcatctggcgtatgtgatttacacatcaggttcaaccggtacaccaaaaggtgtgatggttgagcatcgtgggctaatcaatcttgtctgggataaaattgcccagtttgacgttcactcggatagccggatattgcagtttgcctcattgagttttgatgccagtgtttgggaaatcatggtggcgttgggaagtggggccagtctgattatcgcagtcgatatcgtccggcaggacccgcttcgtctctggcattatctggagcaacaggcagtgacccatgcctgtctgaccccagcctttctccgggaaaggaccgatttaccggaaatgacgataagacctacggtgatactcggtggtgaagcacctagcgtaatgctgcttcaggcactgagtcgtcgggcaacggtgtttaatgcctatggcccgacagaaatcacggtgtgtgcgacgacctggcgttgtccaccagactacacggatatgttagtgcctatcggccatccaacggccaacacccagatttatctgttggatagctacggccagccagtgccgctgggagtagtgggtgagttgtatgttggtggtgtgggggtggcgcgtggctaccttaatcgtcctgagctgaccgcagaacgttttctgtcggatccgttcagtgatgaacccaatgcccgcctgtaccggaccggggatttggctcgttacctgccagacggcaatctggagttcctgggccgtaatgaccaacaggtgaaaatccgcggtttccgtattgagccgggggaaatcgaagcccgattgatggaacacccagcggtgcaagaggctgttgtgttggtgctgggtgatgagcagaacaaacggttggtagcttatatagtggcagaagcggatgaggcgctggttaaccgtctgcgtacacacttgagcgcaatcttaccggattatatggtgccggcggcttttgtacgcctgaatgccttcccgctgaccccgaacggcaaactagatcgtcgggcattaccggtaccgggggaagaggcttttgtccggcagatttacgccgcaccgtcaggagagatggaaaccacattagccgctatctggcgtgaattactgggcgttgagcggattagccggtacgacaactttttcgcactgggcggccattcgttattggcggtgaggatgatgaaccggatagcggcgttggagattgaattaccactgtctacgctgtttacattccctgctttggccgattttgctgaagcgataaatactcgattgaatgagcagagcagcaaactaccggtcattataccactatctggtgagggtaaattgccgttgtcatttgcgcaacagcgtctgtggttcctgtcccagtttgatggagtgagtgaaacctatcatattccggtggccctgcatttgcgtggtcggttggatatcgctgcttggcagcaggcgcttgatgcactgttttcccgccacaaagcgttgcgttctgtcttcgttgccgttgacggtcagccgcaggtggagttattgccggcagcatcaggtttgccgatgaaaaaatatgatctgcgtaacgcacctgatgcggatgcgcagcttgcctctctctctgctcaggaaaccgaagtaccatttaaccttacccgtggcccattaatccgctccagtctggtacaactggctaatgatgaacatgtattcctactgactctgcatcatattattttcgatggttggtctgtcagcgtgttgatgcgtgaattaaacaccctttacaccgcatttctggcggggcagccagatccgttgccaccgttgacgattcagtatcctgattacgccgcttggcagcgacaatggctgtcggctgaacggatacagtcccaatctgattattggcgcacgaagctggctgacgcaccgattctcttggatttgcctactgatcggccacgccctcctcagcagtcatttgccgggaatatcttactcgtcagtttggatgcggagttaacccaatctctcaagcgcctgagtgaacagcagggtgtcacgttatttatgaccctgttggccgcttgggcgacggttttgtcgcgcctgtcaggtcaggatgatgtggttatcggtaccccaagtgcgggccgcagtcggcaagaagtggaatccctgatcggcttctttgtgaatacgctggcattgcggatggatttatccggtgcaccgaatgtgacggaattgctggcgcgtgtacgacaaaccgcactggcggcacaggaacatcaggatctcccgtttgaacaggtggtggaaatcgtgcagccgtcgcgccaactggtgcataccccattgttccaggtgatgtttgcttggcagagcaatgaaaatagggactggatgttacccggactgaccatttcacctgttgggcgatcttttgatatcgctaagtttgatcttgagctgaatttgtctgagatggatggacggattgtcggttatctgaattatgccaccaccctgtttgatcaatcgaccgttgagcggcaggtgggctatctccataccgtattgcgagagatgacggctaaccctcaacagccagttgggaaaatcgatatcctgaccgtggaggagcgtaagctattactggaaagctggaatgcaacccaaacgcgatatcctgaccagacatgtattcaccggctgtttgagcagcagacggagaaaacccctgacgcagtagcgctggtgtatgaagagcgcattctcagctatgctgaattaaatgcccgcgccaatcggctggcctatcggttaattgagcgcggggtacagtcggatgatcggatcgcggtgttgttagaacgatctattgagctggttgtagctcagttggctattctcaaggcaggagccgtttatgtgccgatcgatccccggatgccggacgagcggaaaaactggctgataagcgactgttcagccaaattattgctctccgatatcttggttaacctagcggtccttcagttctgccttgatgatgagatggacgctatcaggcaggaagatcactgtaatcttgacttaccccgctccagtaccgaattggcctatattatgtatacctctggctcgaccggcacacccaaaggggtaatggtgccacatcgtgcggtggttcggctggcgattaataatgggtacgctgaaatcggggcagatgatcgggtcgcgtttgaagctaacccggtttttgatgccagtacctttgaagtttgggcaccgttgcttaatggcggtgcgctagtggtgattgatcacgccacattgctgacgccgaaagagtttgttcaggcattacagacttatcgcattaccgtactgtggctgagtgttgggctgtttaaccgactggcgacagcgttgtccccggtgttgccacaaatcaaaaccctgattgttggcggtgatattcttgatccacatgtcattgcccaggttctgcgtgatggcccgcctcaacaattattgaatggttatggaccgagtgagggtaccaccttcactaccacctaccgcattacggcattatcaccggaagtgagccggatccccattggtcgaccgatagccaatacgcgggtttatctgttagatacctatggtcagccagtgccacagggggtaactggtgagatttatatcggtggagatggggttgcctgtggctatctcaatcgccctgaactgaccgcggaacgttttctgctagatccgtttagtgataagccggatgcccgcttgtaccgcaccggggatttggcccgttacctgccagacggtaatctggaattcctaggccgtaatgaccagcaagtgaaaatccgtggtttccgtattgagccgggggaaatcgaagtccggctgatggaacatccggcggtgagtgaagctgttgtgttggcacagggtgacagccaggacaaacggttggtagcttatgtagcagcagaagcgaatgaagagttggttaaccatctgcgtactcatctaagcgctattttgccggattatatggtaccggcagcgtttgtacgcctggataccttccccttgacaccaaacggcaagctggaccgtcgggcgttaccggcaccgggggaagaagcttttgctcggcaggtttatgcagcgccgcaaggggtgacagaaaccacactggctgctatctggagcgagttgttaggcgttgagcaggtcagtcggcatgatagcttctttgcgttgggggggcattcattgttggcggtgcggatgattgagcgcctgcgtaacgcggggctaatactggcggtacgtgatctgttccaatccccggtgttatccgcatttgcgcaaacagtagggctgtctcgggcagtggtagtaccggcgaatgtcatcaccccggcgaccacggtacttacacctgagatgttgccgctgattgagttggcccagcctgagattgaccatattgtggaacaagtgccgggagggatggccaatattcaggatatctatgccttgtctccgttgcaggacggtattctgttccaccatttactggcgaacaaaggcgatccgtatctgttggcttatcctatagcctttgctgatcgttcattgctggatcgttatctggcggcagtgcaacaggtgattaatcgccatgacatcctgcgtactgcctttgtttggcaaggattatcagttccggctcaggtagtctggcgtcaagcgtcgttatcagtgactgaattgacgttggatcccgcagatgggccagtttatgaacaattgtctcaacgttttgacccgcgtcagcatcgtcttgatttaggacaggcaccactattacgttttgttattgcacaagagacggatggtcgttggatcgtattgcaattgcagcatcatttgattggcgaccataccgcaatggatgtgatgaaccgtgaagttcaggcgtaccttgccgggcagggggacagcttgcctgttccgattcctttccgcaatctggtggctcaggctcggctggggatgagtcaggccgagcatacccgcttcttcaccgatatgttggcagaggtggatcaaccgacgttaccattcgggttgacggaggtacatcgggatggttcacaggtggcccaatcacaccggatgttgcctgccatgttgaatgaccgtttacgtcatcaggctcggcgtctgggcgttagtttggctgcgttgtgtcatttggcttgggcacaggtgctgtcacgtaccagcggacaggagaaagtggtgtttggtaccgtgctgtttgggcggatgcaggcaggggaaggtggtgacagcggcatgggattgtttattaatacattgccattaaggctggatatggatgataccccggtgcaggagagtgtacaggctgcacatactcggctggctggattattggaacatgagcacgcttcactggcattggctcaacgttgcagcggggtacaaaatggaattccactctttagtgctttgttgaactaccggcataatgcgcccgtgattgtcacggatgaagttaccaatggcattgaatttcagggtgagcaagagcgcactaattacccgtttgttttgtcggtggaggattttagtaatgcacttgggctgacgacgcaaatcgttcaaccgattgatccggagcggatatgtgattatatgcaacaggcactggaaagcttggcagaggcgcttgaacagaagtcggagacaccgatacggttgctgaatatcttgccggaagctgagaagaagctgttgctggagagctggaatgcaacccaagcgttgtatcctgaccaatgttgcatgcaccggctgtttgaacaacaggcagaaaaaacccctgatgcgatagcgctgatgtatggagaatacattctcaactatgcggaattaaatgctcgtgctaaccggctggctcgccggctaatcgggcttgggattaggtcggatgatcgcgtggctgtactgttagaacgttctgttgaactggtgatagctcagttggctatcctcaaggccggggctgtttatgtgccactcgatctccgtataccggacgaacggctgcattggctgataagcgattgttcagccaaattgttgcttacggatattccagttgacctggatattcccctgtattgctttgccgatgaggtagacgatattgaggaagaaggttacctcaatcttgatttacctcgttccagtaccgatctggcttatatcatgtatacctctggctcgactggcacaccaaaaggggtaatggtgccgcatcgggccgtggtccgactggtgattaataatgggtatgctgaaatcgggccggatgatcgggtggcttttgaggctaatccggctttcgatgctagtacctttgaagtttgggctccattgcttaatggtggaacactagtggtaattgatcacactactgtattgacgccgcaggagtttgtccaaacattacaggcttatcgagtcactgttatgtggttgagtgtcgggttgtttaaccgattagcggcagagttgtccacggttcttccgcagctcaaaatcctgattgtcggcggcgatgtgctggatccgcatgcgatagcgcaggttctgcgtgatggcccgcctcaacagttattgaatggttacgggccaagtgagggcactacctttaccaccacctaccgcatcacggcattatcaccgggaatgacccagatccctattggtcgaccaatagctaatacgcgggtttatctgctggatatctatggccagccagtgccgcagggggtaaccggtgagatttatatcggtggggatggggttgcctgtggctatctcaatcgtcctgagttaacggctgaacgcttccttgttgatccatttagtgatttacctgatgcccgcatgtaccgaacaggagatttagcccgttacctgccagacggtaatttggagttcttgggccgtaacgatcagcaaattaaaatccgaggtttccgtattgagccgggtgaaattgaggcacggttggtggaatatccaactgtacaagaggccattgtgttggtgctaggtgatggacaggacaaacgtttggtcgcttatgtggtggcacaggaggatgaaggactggctaatagcttgcatacttacctgagtgccattttaccggattacatggtgccgtcggtttttgtgcgtgtggatgattttccgttgactcccaacggtaaattggatcgtcatgcgttaccagctccaggcaatgaagcgtttgcccggcaggtctatgaagcgccacaaggagaaatggaaaccgtattggtggctatttggtgtgaattactggcgattgagcaggtaagccggtatgacaatttcttcgccttgggtggtcactcactgttggctatgcggatgataaatcttgcagctaatcatggacttatttgtacattgaatgatctgtttcaattccctgttctgtctgaactggccgcgaaaatgacatcagataagctgtctcaaccgagaaatagcgcaatatcggtgcgatctgatggaacaggtttaccgttattctttgtgcccagtgggatgggtgattattcctatgtgttcgggttgtctcaacagcttcatctaggctacccgatttatgcactgccttggccgtccatcagtgaagaaccaatgtcgacaatggaagagcaagcgacaagaatgatcaactttatgaaagcggttcaaccggaaggtccatatcggatatgtggttattcttccggtggcatattggcttacgcgattgcccaacaacttctgtattccagtgaggtggttaatttcctcggtctgatagatacgcctgctcctcattattacaggcaacggataacgccaccaaaacttcaattttttattgaattggcgaggcaggcagaggacggatatattgaagaaatggcggcactgtaccggcgaattgatgagttaaatttggtgcagtttatcgaaacggcgcagaaattggcattatacccggcgaatctgcgtgccgatttaatcgcaaaacgttgggagcagatagcaaattatgcacaaatagttagagactatgagccgcaagtatcagcgataacgctgcatcaattctatgcaatggaatcttctccatctgttcctgttgttatagatactaaaattatggatattgaaccacagcctttaaacatgggttcgtcgttaggttgggcgcaggtattacccgattcttcgcttcggttaattccgatttcgggtaaccattttagtctgttggagaataatgaggataaagttgctttagttcaggctttaaatatggcgttggcagtgggttggaacgaagaggttcagtaatggcttaaagagactaaaacgatcctgtatccgtataataatccggcatatataaattatgccgggttttctatatgtgttttgaagagaattgttatctgtttttcctcaaccctattatttcattagatggattcgactaataaatgcaaatgattttacccatactaaacatcgccgtgacctgactggttgttggtggtatattttcgcggtgtttcggtattgaaggtagtcactttttacattgtgtaccaattttagtaccaaactttaatggattgacgagataataatttaaatcgttattttagttgaatatcaaactccttcaagtgacctttcgtgtgggtcaccactgtagataaggattttaaatgcctgttgttactcttcctgacggtagccaacgccagtttgaccatgccgtttctgtaatggatgttgcctgtgatattggtcctggtttagcgaaagcatgcattgctggccgcgtaaatggtgagctagtggatgcttgtgaattaatcgattcagatgcaaatcttgccatcatcacaagtaaagatgatgcagggctggaaattatccgccattcatgcgctcatctgctgggccatgcgattaaacaattatggccagatacgaaaatggctattggtccgattattgataatggtttttactatgatgttgatcttggccgtgccctgacgcaggaagatattgaactgcttgaaaagcgcatgttggaacttgccaaaaaagactatgacgtcatcaagaaaaaagtgaactggcaagaagctcgtgataccttcgttgctcgtggtgaggattataaagtacaaattttggatgaaaacatcagtcgagatgatcgtcctggtctctataatcatgaagaatatattgacatgtgccgtggcccacatgtgccaaatatgcgtttctgccatcattttaaattgcagaaagttgcaggggcatattggcgtggggatagcaacaataaaatgttgcaacgaatatacggtaccgcgtgggctgataagaaacagctcaatacttatctgcaacgtttggaagaagcggctaaacgtgaccatcgtaagattggtaaacaattagatctataccacatgcaggaagaagctccaggtatggcattctggcataatgatggttggactattttccgtgagctggaaacttttgtccggaccaaactgaaagaataccaatatcaggaagttaaaggtccgtttatgatggaccgtgttatgtgggaaagaacgggtcactgggaaaactacggtgagcatatgtttaccacttcttcagagaaccgtgaatattgcgttaaaccgatgaactgcccggggcatattcagatttttaaccaagggttaaaatcctatcgtgatttgccgttacgtatggctgaatttggtagttgtcaccgtaatgaaccatcaggggcattacatggcttgatgcgggttcggggttttactcaggatgatgctcatatcttctgtacagaagagcaaattcaccgggaagtcagtagttgcattaagatggtgtatgacgtttacagcacttttggttttgaaaaaatcgtggttaagctgtcaacccgcccggaaaagcgcattggtactgaggaacaatggaatcaagcggaagaatctctggcggcagcactacaagaaaatggtgttcaatttgaatatcagccaggtgaaggtgccttctacggaccgaaaattgaatttactttgcatgattgtttggatcgtgcgtggcaatgtggtactgtgcagctcgacttttcactaccaggtcgtttgagtgcgtcctacgtaggtgaaaataatgaacgtaaagttcctgtaatgattcaccgagcggttctgggttcactggaacggtttatcggcatcctaactgaggagtatgcgggtttcttcccaacatggattgccccacagcaggtagtggtgatgaatatcaccgatagccaagctgattatgtacaggaattagtaaaaaaacttcaagatgctggcattcgtgcaaaagcagacttgagaaacgagaagattggctttaaaatccgtgaacacactctacgtcgtgtgccctacatgcttgtctgtggtgaaaaagaggtcgaatcagggaaagtttctgttcgtacccgccgtggtaaagatttgggcagcattgatgttaacgggttcatcgaaaaactgctgatagaaatacgcagtcgcaatcttcatcaattggaggaataaggtattaaaggcggaaaaagaattcaaccagcgcgtcctaatcgtattaatgaagagattcgcgctactgaagttcgtttaacaggttcagatggcgaacagattggcattgtcagtctgggaaaagcgcttgaaaaagctaaggaagagggtgttgatttagttgaaatcagcccgaatgctgagccgccggtttgccgtcttatggattacggcaagttcctgtatgagaagagtaagtcaaccaaagaacagaagaaaaaacaaaaggttactaaggttaaggaagttaaattccgtcctggtacagaggaaggcgactatcaggtaaaaataggcaacctgaagcgttttctggagaatagcgataaagccaaagttaccctgcgtttccgtgggcgtgaaatggcgcaccaacagattggtatcgaaatgcttgacaaagttcgcaacgatctggatggactggcggtagtcgaatccttcccttcgaagattgaaggccgtcagatggtaatggtgctcgctcctaagaagaaatagttaggcaatcaagtaataagctcctgtcggttcatctgattggggcttgttcgcctgactaattcgttataatttacaatgcaaagtggaaattaaaatgccaaagattaagacagtacgcggcgccgctaaacgctttaaaaaaaccgcaagtggtggttttaagcgtaagcgtgctaaccttcgtcacattctgactaagaaatcaaccaagcgtaaacgtcatttacgtccaaagggcatggtctccaaaggtgatctgggcctggttgttgcttgcttgccgtacgcataagcaatttttagattagaattcagagacgataggagaagtatatggctcgcgtaaaacgtggtgttgtcgcccgtgcacgtcacaagaaaattttaaagcaagcgaaaggttactacggtgcccgttcgcgcgtttaccgtgttgccttccaggcagtaattaaagcagggcagtacgcttaccgtgaccgtcgtcagcgtaaacgtcagttccgtcaactgtggattgcacgtatcaacgctgctgcacgtcagaatggtttgtcttacagccgtttcatcgatggtctgaaaaaagcctctattgaaatcgaccgtaagatcctggctgacatcgctgtgtttgacaaagtggcatttgctgctttagttgaaaaagcgaagagcgctctggcataagttagggtagtaagaggggggcatgctccctcttttactttgttgtcagatgtagcttacgagagagagtcgttgtcaaaaaagagttttactctgagagaactaacattatgtctttagctttttttcgcatctttttttactttagcacctgaattcagggggctttgcgcgtaagaaaagaaacgaaaagtagcgcctgagcctccgttgtggaggcttttttgtttttatgacagtaaggccgttaggccgaaggaagaggaaaacgatgccacatctcgctgaactggttgcaaacgcaagagcagccatagaagatgcccaggatgttgctgcgttggatttggtgcgtgttgaatatttaggcaaaaaaggccatttaactctccaaatgtcatcgctgcgtgatctgccggtcgaagaacgtccagcagcaggggcggttattaatcaggttaagcaagaagtccaggaagctctgaatatccgtaaagaaaaactggagactgaccttttgaacttccgtttagcagcggaaaaaattgatgtatcattgccgggtcgccgtatggaaaatggtggactacatccggttaaccgcacaatagagcgtattgagactttctttggtgaattagggttttctatagaatcaggccctgagattgaagatgattatcataatttcgatgcgttgaatattcctgctcaccatcctgcacgtgctgatcatgatactttctggtttgatgccaaacgtctgttgcgtactcagacttcaggtgttcaggttagaactatgcacagtcaacagccgccaattcgcgtcattgcaccgggtcgcgtgtatcgtaatgactacgatcagacacacacgcccatgttccatcaggtagaaggtttgattattgatcgtgatatcagttttaccagcctgaaaggaacgttgcacgatttcctgactaacttttttgaagaagatttgcaggttcgtttccgaccttcttactttccatttacagaaccttcggcggaagttgatgtaatgggtaaaaacggtaaatggctggaagtgttgggttgcggtatggttcatcctaatgtattgcataatgttggtcttgatcctgaaatttattctggttttgctttcggcatgggagtggaacgcctgacaatgttacgttacggtgtaactgatttgcgtgcgttcttcgaaaatgatctgcgttttctcaaacagtttaaataagggcgggaatatctcatgaaattcagtgaactctggttacgcgaatgggtaaatccagccattagcagtgaaacattatctgatcaaattaccatgataggtctggaagttgatggcgttgaagccgttgccggtcaatttcatggtgtggttgtcggtgaagttgttcaatgtgctcagcatccaaatgcagataagctacgggtaacaaaagtgaatgtaggcggtgaacgactgctggacatcgtttgtggtgcaccaaattgccgcttggggttgaaagttgctgtagcaaccgtgggtgctgtattaccgggtgatttcaaaatcaaggcggcaaaactgcgaggtgagccttctgaagggatgctatgttctttttctgaactgggtatttctgaggatcacgacggtattattgaattgccaattgatgctcctttaggtgttgatctgcgtgaatatctgaagctggatgataaggtcattgaaattagtattacgcctaatcgcgctgactgcctaagtattataggggttgcgcgtgatgtggcggtcgctaataaaatgccactatctgagccacaaattgaggcagtaaaaccgacaacagatgctattttccctattcgtgttgaagcaacagaagcttgtccacgttaccttggacgggtaattaaaaacattaatgtgaaagcggcaacaccccaatggatgcgtgaaaaattacgtcgtggtggtatccgttccatcgacccgattgtcgatgtgactaactatgtattgcttgaattaggccaaccattgcatgcgtttgatttggagcgtttgaatggctcaatcactgtgcgcatggcgaagcaggatgaaaaattggtgctgctggatggtacagaagccaatctttctactgataccctagttatttctgatgaaaaacaagctgttgcaatggctggtatttttggcggtgaacattcaggtgtgaatgaagaaacgcaaaatattttacttgagtgcgcattttttgctcctttagcgattgctggccgtgctcgtcgttatggtttacacactgatgcttctcatcgttatgaacgtggagttgatcctcagttacaacacaaagcaatagagagaacaactcaattattgattgatatttgtggtggtgaagctggcccgattattgatgttactgatgaatctcaattgcctcaatctgcgacaatcacattgcgtcgtgaaaaactggatcgtttgattggtcactatatacctgatgaacaggttggtgacatcctgacccacttaggttgcaaagtcactattcaggaaaattgttggcaagcggttgcaccaagctggcgttttgatgtggagattgaagaagatttggtggaagaggttgcccgtatctacggttacaacaatattccagatgtaccgattcgcgcagatcttatcatgaaaaaacatcgtgaaacggatctttccctgcaacgtgttaaaacggtgctcgttgatagaggttatcaagaagcgattacttatagctttgttgatcccaaaattcaggcgctgttacatccacagcaacaagcgttgatgctgcctaacccaatttcagcggatatgtcagcaatgcgtttatctctgctgactggtttgttaacaacggtggtatataaccagaaccgccagcaaaaccgtgtgcgcttgtttgaaactggcttgcgttttgttcctgatgaaaatgccgatcaggggattcgtcaggagctgatgctagggggggttattacgggaaatcgctttgaagagcattggtcactggaaaaacagtccgttgatttcttcgatatgaaaggcgatttggaagccgttctagagttaactggaaaattatctaagatttcttttagagcagatgtaaatccggcgttgcacccaggtcaaagcgccgggatttatttggaaaatgaatacatcggatatattggtgtggttcacccagaattggaacgcaaacttgatttaaatggccgcaccgtggtattcgaagtactctggaacaagctggcaagccgcgtggttcctgatgcgaaagagatttcacgtttcccgtcaaaccgtcgtgatattgcgatcgtggtgcctgaaaatgttgctgtagaagatgttttggctgaatgcaagaaagttggcgtaaatcatatagttggcataaacttgtttgacgtgtattgtggtaaaggtgtagcagagggtcataagagccttgctataagttttatcttgcaggataccgcgcgtacactggaagaagaagagattgctgcgacgattaataaatgtgttgcagtgctgaaacagcgattccaagcatccttgagggactgaacttatggcgcttactaaagctgaaatgtcagaaaatctgtttgagaaactgggaattagcaagcgtgatgctaaagatctggttgaattattctttgaagaagtgcgtcgttctttggagaatggtgagcaggtaaaattgtctggatttggcaactttgatttacgggataaaaaccaacgtccgggacgtaaccctaagactggtgaggacattccgattacagctcgccgagtagtgacattccgtcctggtcagaagttaaaaagcagggttgagaaagccacacctaaagaataatcaaaaaggccgcatcaatagcggcctttttcttaaatgatcctccctcatgagcttgatttaccatgcaatccactcattccatcgctgaattagtgactcgtcagaaaagacatgattatcgttttctggcaattctcacgtgtttatttttactcgttttttttctctcgctttgtgctggggaaaattggatctggcctaataaatggttttctgaaacaggtcaattgtttgtgtggcagttacgttttcctcgtgtattagctgtcgttgctgtaggtgcgagcctgactgtggcgggtgcagtaatgcaggcactgtttgaaaatccgttggcggaacctgggctattgggggtcagtaatggtgctggcgtggtggtggtgtttttggtgttgatgtttcatggcattgcgccgttctggttattaagtattggcgctgtgctcggtgcgctgaccgtcacaatgatattgctgaccttttcaagaaatcgttatctgaataacgcccgtttgttattggtgggggttgcttttggtgttgcctctggtgctttaatgacctggatggtttattttagtactagcttggacttgcgtcagctaatgtattggatgatggggagttttagtggaatagactggcggcatcaatggttggtagtcgctttgtttcctttgattatttggttgagcagacaaggaaaagtacttaattttctttcactgggagaaacacaggcccaacagctaggtatctcactttattattggcgtaatttatttgtctttgctgttgggttgttggtagggttaagtgttgcacttgctggaacaattagctttattggtttggttattccacatattttgcgtttatgcggcctaacagattataaaactctactgcctgcctgtgttctatccggcggttatggattattgctggctgatctgctatctcgtcttagcttgaataatgcagaagtaccgattggtgttgtaactgcaacattgggtgcgccagtcttcatttggttattattgagggttagagactggagttaaaaagtgaataatgtgcaagtgactaatcagttgatggctctcaatcaggtatcagtacgaaaccgattaatgccgctgacagcgttggtacaacaaggtgaacagatacatatcattgggccgaatggttcaggaaaaagtacactattagcctgtatggccggtattttaccctatagtggtgcaatcgatttgcaacaaaagtgccttagtcaatatagtcactgccaattagcacgctacagagcatggcttagccagcaaatttcttctgtgccaataatgccggtttttcaatatttgcaactgcatttagcagctcatcttgttaattgtgacggtgtgttgtcagaactctgttccttttttaagttgggaaagtttctagagacacctgtaggcaatctatctggtggtgaatggcaaagggtgcgattaaccggagtttttttacaagtctggccatcaatcaatttggaaggcaaattattgctcttggatgagcctacgaataatcttgatatcactcaggtcgcggcacttgatctgttgataaagaaattctgtgaacttggtggaaccgtagtcatgagtggtcatgatctcaatcatagctatgataaagctgatcggatctggttgcttgctgatggatcactggttgcgaatggaaagccggatgaggtaatgaaagaaaatacgctctccagagtttttgccgctgatatcaaatgcgtgccagaaaagacagataaatattggcgggttttcttaccataattacagtccaggcttatgtatgtgcctgccgtgaatctgtacgtatcgtggatcgatagtaatttccacttaatttgctaaatcatacctgtgtttacgattcgttcaaatatagtcatctaatatatcgttatattatgaatgaattggactgtgttttatggatagctttcttccattttctcgtcctgcaatcggtgatgaagaaattcaggcagtagagaaggttcttcgttcggggtggattacaacaggcccgcaaaatcatcaattggaacaggacttttgccgcatgtttggttgcaaacatgcggttgctttagcctcggcaacggcgggtatgcatctgacactaatggcactgggaattggccctggtgacgaagtgattacaccgtctcaaacttgggtttccacaataaatatgatctgtttgcttggtgctgaaccaatcatgattgatgttgatcgtcatactttaatggtcgacgcgcagacagtgaaaaaagcgattacttccagaaccaaagcgattattccggttcactatgccggtgcgccttgtgatttagatatattgcgtggaattgctcaggaggcgggtattcccttgattgaagacgccgctcatgcattaggaacccgttataagaatgaatggattggtgagcatggcacagcgattttctcttttcatgccataaaaaatgccacttgtgcagaaggggggttaattgctactgataacaatgaacttgttgaacgaattcgatgtctaaagtttcatggattgggtattgatgcttttgatcgtcagattcaaggcaggagaccacaggcggaagttgtagaaccgggttacaaatataatttatctgatattcacgctgcgattgctgttgtgcaattaagtaaattggaatcaatgaatattcgccgtcggcaaattgtcgcccgttattcaacggcattaaaagattctcctttgcagatgttaagtgtgcccgattatgagcatattcatgcacatcatctatttatggtgcgggttaataaggatgtttgtggcattgatcgcgacacattaatggaacgtttgaaaaacaagaatattggcacaggtttgcatttcagagctgcacatacacaaaaatattatcgagatcggtatccgcagttgtcattacctgaatcagaatggaattcagtaacactctgttcattgccactctttcctgatatgagtgatgatgatgtagatcgtgtcactgatgctttacaagaaattatttcggagcacagataagtgtcatttgaacaaattaaaaaagtttctgttgttattccaatttataacgaagaagaaagtttgcctcttttattggaaagaaccttagcagcctgtaaacaattgactcaggaatatgagcttattcttgtcgatgatggtagtagtgataaatctgcggaaattctgattcaggccgcggaacaacctgaaaatcatattatcgcaattttacttaatcgtaattatggtcagcattcagcgattatggcggggtttaatcaggtcaatggtgatttaattattacgcttgatgctgatttacagaatccgccagaagagatcccccgtcttgtgaaaacagctgaacaaggttatgacgttgtgggtactcgccgagctaatcggcaggattctctgttccgtaaaacagcttcaaaaatcatcaatgcgatgattactaaggcaacaggccgttctatgggcgattatggctgtatgctccgtgcctatcgtcgccatattgttgaagccatgttgcagtgccatgagcgcagcacctttattcctattctggcaaacacttttgcccgtaaaaccattgagattgatgtcgctcatgcagagcgtgaatttggtgattccaaatatagcttcatgaagctgattaatctgatgtatgacttgctaacctgcctgacaacagcacctttgcgtttactgagtgtggtaggaagcgtgattgcagtttctggttttttgctggctgtattattgatggttttacgtctgattttcggtgccatatgggcagcagaaggggtatttaccctgtttgctctccttttcatatttattggcgcgcagttcgtcgcgatgggcttattaggtgaatacataggccgtatctataacgatgttcgtgcacgcccacgttattttattcaaaaagtggtcggagataacaagaccaacgacaaccaggaagagtactaaatgaaagcaattgtatttgcctatcatgatatcggctgtgtcgggatcaatgctttaaccaaagctggttttgatattcaggcggtatttacccatacagatgatcctaatgaaaaccattttttctcttctgttgcccgtttaagtgcagatttggcgctgccggtttttgcgccagaaaatgttaatcatcctctttggattgaacgtatccgggaactgaaacctgatgtgattttctctttttattaccgagatatgttgagtgaagatattttatcgctggcgagtacaggtgcattcaatctgcacggttcactgttgccaaaataccgtggtcgtgccccgattaactgggcgattttgaatggtgaagtggaaacaggtgtaaccctgcataaaatggtgttgaaacctgatgcaggggatattattgctcagtataaggttgctattgcagagacagataccgcgttgactttgcacggtaaaattcgtgaagcagcggaaaaactgtttgatcaagtattaccccagatcaaagcgggaatttatcctgccatacctcaagatgaaagtcaggcaacttactttgggcgtcgtactgccgtggatggtgagattgactggcacaaatcagctactgaaattaacaatcttgtcagggcagtaactgagccatatcctggggcatttactttcttaggtgagcgtaagattactatctggcgtgcctgcccgttgaatgagacgcatgacaaacagccgggaacagtattatcggtagatccgttaattattgcctgtggaaaaggcacgttagaaattatcaatgggcaaagtgaatcgggtttgtatgttcagggccaccgcctggcagtagatatgagcatggtgactgatgtacgtgttggcccaaaggcaactactcaaattaaccaccggaaacgtgtattaattctcggtgtgaatggcttcatcggtaatcatctaacagaacgtctattacgtgatggcaactatgatatttatggtatggatatcggttcttccgccattgagcgttttattagtaatccgcgttttcacttcattgaaggtgatatcaatattcatactgaatggatcgaatatcacattaaaaagtgtgatgtcgttttgccattggtagccattgcgactccaattgaatatacccgtaatccgctgcgtgtatttgaattggattttgaagagaatctaaagattgtccgttattgcgttaaatacaataaacgaattatattcccgtccacatcagaagtttatggaatgtgtgatgataaagaatttgatgaagatgactctcgtctgattgttggtccaatcaataaacagcgttggatctattctgtatctaagcaattgttagatcgtgttatctgggcatatggcgagaaagaaggactcaaattcacactatttcgtccatttaactggatggggccacgtttggataatttgaactccgcacgtattggcagttccagagcgatcacacaattaatattgaacttagttgaaggttcaccgatcaaactagtagacggtggcgaacagaaacgctgttttactgatattaatgatggtattgaggcgctgtttcgtattattgaaaaccgagaggggctatgtgacggtcaaattatcaatattggtaatccaactaatgaagccagtattcgccaattggcagaaatattacttgatagctttgaagaccatgaattgagagatcattttcctccatttgctggatttaaaaaggttgaaagtggcagttactacggtaaaggttatcaggatgttgaacaccgtaagccaagtattaaaaatgcggagcggttactcgattggaaaccaaccattgacatgaaacagacgataaatgaaacactggatttcttcttgcgtggcgccgtggaagaattagggaaaaattaatgaaacaaattggcttgagagttgatgtggatacttatcgaggaaccgttgaaggagtaccgaagctgctcaaaattttggcaaaacatcagattcaggccagttttttctttagtgttgggccggataatatggggcgccatttgtggcgtcttttacggccaaaattcttatggaaaatgttgaggtcaaatgcagcatctctgtatggtcttgatattttactggcggggactgcatggccgggtaagaagattgctaaagatttaggctacttgatgaaacaaacgctgaatgcaggccatgaagtgggtctgcatgcctgggatcatcagcgttggcaggcgaaagttggccgttggtctgaagctcagttaacagagcaggttaaattgggcgtggatgcattggtacaggcaattggtcaacgggtaacgtgttctgctgttgcgggttggcgggctgatgaacgcgtactcgcggtaaagcaacagtttggttttgattacaacagcgattgtcggggaactcatccattcaggcccatcttgcctgatggtactcttggtaccgtgcaaattccggtgacgttgccaacttatgacgaagtgataggcattcaggttaaagatgaagattttaaccagtttatcttggataagatgaaaaacagccagggagttccggtatataccatccatacggaagttgaagggatgtccaagtccacagagtttgcaacactgttggaaatggttcatcaggaaaacatacaattttgtgcattgagtcatctactacctgaaaatatacaaagactacctgtcgggagaattgttcgttctgaatttcccggtagagaagggtggttaggatgccaacaagaggcttaacttatctatgttgaataaccgggcgtgtaaggttggggcctttttgatggctcttttttttgtcattacctatttattacccctgaatggccgcctattatggcagcctgatgaaactcgttatgcagaaatcagtcgtgaaatgctgcaacgaggagactggattgttccgtatttgctggatattcgttattttgaaaagcctgtagcgggttattggatcaataatattagccaatggatttttggtgataataattttgctgtccgttttggatcggttttctgtatttttatcagcgcaattttattatatcgacttgctatgatgatgtggcataaccggcatattgcttttgccactagccttatctacatctcaatgtttctggtatttgccattggcacttatagcgtactcgatccgatgttttctttgtgggtaacggctgccatgatgtgtagcttctgggggctaaaaacagactgtaccagacggcggataatggcatatttggtgctcggtttgtgctgtggtatgggttttatgactaaagggtttctggcattggctgttccggtcattgtgatgttgcccattgtcatttatcagaagcgggtcctgcaaatagtctgctttggcccacttgccattatttcggcgatagcaatcagtttaccgtgggtgattgcaattgccctacgtgagcctgattattggcactatttcttctgggttgaacatattaagcgtttttcttccgatgatgcacagcatattgcaccgttctggtattacatacccattcttattcttggtgtgatcccgtggttgggattattacctggggcagtgatgaaaagttggaaagaaagaaaatccaatcctgaaatgttttttctactttgctggtttgtcgtgccattgttatttttcagtattgcgaagggaaaattgccaacttatatcctgccctgtatggcgccattggcaatgatgatggctaaatttggtgtcgattgcgttaaaaatggcaagatggagttacttaagatcaatggaatggttaacgtatttcttggtctgctggcggtaatagttctgtttgctatggaagtagtgacaaaacacgctttatatcagccatcagaatggcttaaatgggttttagcgattgttgcttttggtatttggggaattatcggttatctgtgttttgcgttgaatgggaaatactggttattggcggcattttgctccattgttgtcagtttagtgataggtcatgctttgcctgaaaataccgttaattccaaattaccgcagaactttattaagttacaccatcaggaacttgcaggcagtcgctatatcctgtcggaaagtgttggtcttgcgaccagtgtcgcttgggagatgaagcgtagtgatatttatatgtttgaacgttggggagaactggaatatgggttgaattatccagatagccgatatcgatatatcagctataaagattttccgcaatggttagcgaaagcacgtaaagaagggcgggtatcagtactctttcatttatataaagatgaaaaattacctgatttgccaaaggcagatcaaattagtcgcaattatcgctttgctattttggtttatgagaagcaaccatgataagtttctctttattgttgctgattagcttgctgacatgtgctggtcagttatgtcagaagcaggctgtgatgtgttggcgcagtgatgtttatcagcgggcatctgcgctgaaatggttaataggggctgtgattctattggctgttggcatgttattttggcttcgtttattacagatattgccgttaggaattgcttatccaatgttgagtataaattttattatggtcactttggcggggaaatttttctatcaggaaaaagcgggcataaaacattggagtggggttgtgtttatcatgttgggaattttgctgatgagcttgaatgaatgaaaggttatatttggggattaattagtgtattactggtgacaatagcccagttattactgaaatggggtgttgtcaatttgccagcgttgaatcttggtttgcattggtttgatattgagtggctatggagtcatcgccattctctggtggcggtaatggctggtctggctggatatctattatctatgttgtgttggttatttacgctaaaatatttaccattaaataaagcttatccattaataagcttaagttatgtctttgtctatttaatggtggctttattgccttggtttaatgaaaccatcacattattgaaaactgcgggcgtgatttttattttgtatggtgtctggttgattagccgtccagaatgaagaaggaaataactatttaactgttttacttaaagtacagacttgtttttttattgagttctggatagagtcaccttgctttgctgattttatgaggaggggttaatgataataagaataaaagagttactcttattgttcagtctgttacttattggctgttccagtcatgcccccaggactccggctcctgtgttaaagacggcgctttctgatccaatcatggtgattgctcagcttaaggagcagcttaatcaatggcgtggtacaccatatcattatggtggaatggatcgccggggggtagattgttctggttttgtttaccgtactttcagtgatcggtttgatattcaattacctcgtactaccggtgggcaaataaaattagggacccgtattgataaaagcgatttaatgccgggtgatttggtctttttcagaacagctagtggcgaacatgggttacatgttggcatttatgacgccaataaccagtttattcatgcatcaacccataaaggtgttactcgttcatctatgaataatgtttactggaagaaagctttttggcaagcccggagaatttaagtccgtttttatccgcgaattgtaaaaattattcttattaagatagcagttttatttaaatctcagtaattattatcagtaattctaattttattaattgcattttaaccatctaaaacaataattattttataacagtaaataaattatccatattgcatttaacttggtcaggtaatatctgattttgttttaaggtatattagttaaaaaagtttaaaaataaataaccagttccttaatatacaatgagctggttataatgtttattattttgttatttatagtgtgccgctattataatttttagggatgcgtaatttatttatttatttatttatttatttatttatttatttatttatttatttattgtatgaattactggattaatgtttttatagtttataactatatttttaaatgtagcaatatattatttgcatattttcaataaattttttttcagaaataaaatcttattttatgacggaaaacttaaacattatttattaaatcgacttgtttttatgagttgtgtttttatttgccagattagactaataggtgtattttcatgaggattatacccgttatctttcaagttgcctctttgttggctgcactcactcaccccggtcacatagttatctatgctcccggggattcgctcccttgccgccgcgatgcatctcgaaatccatagggtatagatcagttgctatatttcagcatcttttttgccaaaggggaatacatcgtgaaatattaacaattaacctatgaagaacaatattagatttatattttaaagaaaaaagtaagaacataataatctgatattaataatggctaatcagggatttatttattttattttaaaacagttttacattctcgcaccataaatatgattgattagccaaataatttttatcttccataaattaattatactttggcgaagagaatagacctaataacttaaatcatatcaagaggaaaactgatgacagataaacaaccttattttccagaaataaaatattctccgtggggacctaatgatgccccattatttatcatacttggacaatcaaatagttatggacatggaacacaattaccacaagatgaagaaattacacaaggtttaaaaaatatattcacattatctctatcagaagtttacagcgttgactttcccgcaatcaactggacggggctgactagctttggtgatgccaatattggcgctcctgtcggtttatctcgtggcaatcaggatcactcagtcaatgccgccaaccgttttgccaaactctggcaagaccatattaaccggggtaatgcacttaatttacctgatctttatgtcattttaatggggtggggcggtcagggcatgtatctggataatccgccggataaccgttgggctcctgaacgagatccttgcgatgtggaatcgctctatccgcgtgcgatcagaaccttgcgcatggcagttgaatcactgcgtaaactaggaaaaaatccttgcattttggctgttcattggaaccagtgggaagcagagaccgagagtttattggcggcacaggcatcagagcggaattttacccgtatcattactggtatcagtgatgctttgggttctcgcagtataccgtggagattgtattatccactttcagttgcgtttgatcccatcaacacccgctatgtgctcaaggcaatcaataatgttatcgctgatgatccccaatatcgaacgctaattgatgcacggaattcgcccgactataccggaaaggcgactgagtttggtgtttttctacctgatagtcttcattatgatggcaaagcccagacatggtttgcccaacgggaatgggagttgattttatctggttataagggggttgaactgccataggattaaataggattaaccatccaagagataccaagatggcggctagagccgtcatcttatcggtaggaataatatatccttgagtatctatgtatgccttttcggcatacatatggataaacgtctattttgtatgccataatggcaccatgtttatatggactaaaaatgcagatgaaatcatggctactaatacagaacgtaaagagacccgtttagttgcaagaacttccatagagattcaagagatcatacaaagggcggctgattactccggcgcaacactttcacagtttcttattgaatcggcaatggagagagcgcgtaacgtgattgaacgaactgaaaccttacatctttcgatagagggggctgatgctttgctggcagctttggaaaacccgccaaaagcaaatgctaaactacttaaagccgcaaagcactataaggatacagtgaatgtcggtaatcattaaagaaatcacccagcaacatggtcgtaaagcgtttgattgtggtgtcagtgaattaaataagttcttacaacagcaagctcggcagaaaaccgtaaagcatatttcaaaaacttatgtggcctgccgagattccgtgcccacgattataatcggatatcacacacttaccggatattcggtgacaactccgcttgcctatagggattacaaaaaatatcctcatccacttagtgcggtaaaattggcccgacttgctgtggattgttcacatcaggggcaaaggataggtgaacagctattgattgatgccatttatcggacagtgttggtcgcacagcaagtttcagcgattgggctgtttgttgatcctatgacctcagaagttattccgttttatcagcaatatggatttttgccagccgatcctaacgataattcacgtctcgaaatgtggctacccatcaaaacttgtatagaagtcacgagtaccttcaaaataagtcagaattgccgcctatcatgctgacggcaatctttggcgagttatacccgtcatctttcaagctgcctctttgttggctgcactcactcacctcggccacatcgttatctatgctcccggggattcgttcccttgccgtcgcgatgcaacttgaaatccatagggtatattgaagtgttattgccaactgacagtaatttctccggtttgacctgctatcggcataacgttaccgtttccaacctttaaggcgaaaaggaactgttgtgccgggcttctcttattaaatgcgtctgtcgacattcttcgtgtgcgtgatatatctatgcaactgctggtatctccctgacaaagataaaccgataaattctgaggccatccaacaacattccaagtccaagatacattgttaatctttcctgttgcaggaggagaaccgacaataggaacgttaacagtttctaagaaatttttagaatatagtgtgggcaaaacaactgaagagtgatagctgccacttgccgcaggtactgtctgtgagaatatagttaacaataaagcgccaccaataccaaatattttttttaatttcatagccattaccccaatacctgataattttctattgcgagaacttagatatacattttgatctcgcgccgtgtatctcctgaatttttataaaagcatgtacgcaataccaaagtaggcaggagtaatttgggtggattaacaccaaaaagcaatggggaatttgaatttatgttaagttaatctaatatattttgctattcgatgcttttgccagtcacttagaccgtaatcttttacaacaggatttccccatgatataaaacctgctaaacaatcaagtggagtcagcgatacgtttaatggatgttaaaaacgatgaataaattagacatgacaatcaccacttccccatgtcaggaagccctgatttacatggaaaatatttgtcgatcttatcgtatgggggaaaaatatttacccagtacttgatgaaatatcattcaccatcatgcgcggacaaagttgtgctattgtcggtgcttccggttcgggtaaaagtactttactcaatattcttggtttactggatcaaccctcttctggatattttcagtttagtggcgttaatataacaaatgttactcctaatgaacgggcgagaataagaaatcaggaaattggtttcgtgtttcagagttttaatttacttcccagaatgcaggcgttggataatgtagcgctaccattgttatatcgtggatattctcgttctctagctcggcaggaagcgaaataccagcttgagttggttggtctggcgggtcgtatttaccatcgtccggctgatctctccgggggacagcggcaacgtgttgccattgccagagccttggttggtaagccttctttgattctggcagatgagccgacaggcaatctcgatagtgctacagcacgtgatattatggcacttcttctgtcattgaaccgtgagcaaggcgttacgctcgtcatggttacacatgatgaagccatagccaaaaatatgcagcgctgcctctatgttaatggtgggcggctttccgaaactgatctgtggctggatagcctcgatgcttaatgtgaattctggtcgctacggtttttccttcgcgcaggccctgtgtgaatcactgggtagtctgcgtctgctaggaaggcgctccttgcttgctttgcttggtattgcagttgggtgtgcttctgtcattgcacttttaaacatcggtcataatgctgttaatgaagctatcagcacttttaaaagtatgggaagcaatattttagttgctcatttcagttttactccaggtaccgatgtcaaacccgcgccatctacgctggatactcaggcgctgactcgtacaataccgactatcacacatgctgcgcccctcacattgcactcaacccgtatacgctttcaaggacaagggatcgatacgaatattactggtacatcctctgatctggctgcggtgttggatttacaaatcgagcaggggcgttttctatcggactatgatcgccaaacgacctatgccgtgctcggagcgaatattgccaaacaattaaaagtcgctaatcaacctattcggataggtaatcaattgcagattggggaatatctatttgaagtgataggaattctcgctgttcagggaccgaaccctttactccccggttctattgatgattccgtcatactgcctatcgaagcaatgcggcggttgcggcctgcgccagaaattggaagcgttattgccagagcacgtgacacaacaacgctaaacagtgacgcggtgtcgttacgtgactatcttgtctcattatcaaaaggtcgtcaggttgaagttgatatcccgaaacaattgcttgatggattgacgcgtcaggcaagaacattttcctatttgctcgcgggcttagggggaatttcgttgctggtgggaggtgtgggcgtgatgaatgtcatgctgatgaatgtttcggaacgtaggcgtgaaattggtgttcgtatggctttgggagctcggcctatggatattggtatactgtttatgttggaggctgccattctggcaattgctggtgcaatggttggttcattattgggggtagtggcgggatacctatttgtaaaattttcgggttgggtatttacgttatccctattctctttgcctctgggtattgctagttcattagtgattggtctatttttcggtatcaatccggcattagcggctgccagattacaacctgtagaggcacttcgtgatgattagccaagtttttcaacgtgctattggcatcatcattgccttgataatagttgcatctgtcaaaccagcgttagcggagccgttgaatccatcacaggcaaccatgcctgcaacggatacaatttcgcttaatcagaaaactattggtctgacactcagcgatgcaatctatttagggttacgaaataatcgttcgattcgcagtgcttatctggatcgaattgcacagaaattcgatttacgcgttgctgaagatcgttttacgccaaaattactgattaatagccgttatattgctgctcgtaatcaaagcgatcgctatcgccagagcgagattacacccacatctacgctgcttggagaatatggtactcgattcagtctatcttggacgaatcggacgacatgggcagacaatgcaggtcgtagccgtaatgatggtgtttcattctcagttattcagcctttgttgcgtggtgccggcaaagatgtggccacagcacctgtacgtcttgctcaattgatggagcaaacaaatcgtttgaacctaaaagcgacggtatcccagactatcacgcaagttattatggcttatcgtggattgttgcgtgctcaagaacaattacaaatcgcacgtgatgctcttgaacgttcgcgtcaactgctggaggttaacaaggctatgatttccgcaggcagaatggcagcttttgagattgtccagacggaggctgatgttgcaatgcaggagctggctgcggaggaagcggctaatcaattggataccagtcgtttagaattgctgcgattgctcgccttagacttacaaactcaggtaaaggctactgacagattggaagctaagcgcgtagatattaacctgctccaagcgcaacatttggcacaagagcaacagccatcgtatctcactcaattgattacggcggagcaggctgcaattaacctgaccgttgcccgtaacgaacgtttatgggatgtctctttagtgggtggtgctagtcaggtacgtgatcgaacaggatcaaaccgttctcgtaattgggaaaattacgccggtgttcaggtagagatacccattggcgatttgagtcagcgccaggcggaagtgcgggcgcgggttgatgttcagaaccaggacattcgtcttgctgaggcgaaacagtcactagaacgtaatgtgggtaatgcggtacgcgatattggtacgcgttggcgtcaatatgagatcgcccagcgtgccagggatctatctctgcgcaagctggagattgaacgtgaaaaattgacggtgggccgctccagtaactttcaagtcttgagttttgaaaccgatttgcgtaatgcagagaatgttcgtctcaatgcgttgatcacttacttaaatgcacaagcggagttggacgaaacgttgggtactacgttagggagttgggatattgcacttaatgactaagatcaggggacttgcccgtttcagatataagactcgttggctcgtgacacttgctgttgcattagtcattggggctaccattgcttatgttttgttttcttcttcaattgatacatcatcaccgcaacggtgggtgcatgttgaacctcaacgactcgaaaatcgtcttgggttagttggccgtattcaggcggcaaccagtttgacgattgccgcgccatttgatggtgttattgctgaagtgatggtaactgaaggccagcgcgttaagcgtgggcaacccctgttgagccttgatacgacacaattggacattcagttgcggcaggcgctcacggaactgttgaaagcccaaaaaaccgtacaagatttggtggggtgggagaacagtcaggatgtcgctagggtacgtagagctttaacgaatgctcagttaagtttgagcgataccgaacgtaagctaaccgatacccgggctttgttcgagcgtggcattgttccccgtatggaggttgatatactggagcagcaggtcagagttcaacagctcgatcttgccgccgctaaggcggaactgagtgttgctctcgataaaggcacaggggagaatcgccagattgctgatatggaattagctaatgctcaatcgcgttatcaggcgcttcagatccagcaagcccaacgtgaattggtttctccttttgatggcattgttattcgccctcaggtaccggaatcagataagggggtatttattcaaaaggggacacgtgtcactcagggaacacctctgttaggggtaatcaatttggagcaaatccaggcggtagcgcgtattgaagaggctgacctttatcaggtgtatgaaggaatgccggttgagataaccggggatggttttgccgggctatctctacgggggcaaattaagacaattggtgtacaagggagttcaaaggagatgcagggagcgggtgtaacctatgatctattagtggcaattgatcctcttactcccgaacagcggcagcgtatccggctgagtatgagtgcgaaactggctattgtcacctatcgcaatgaacgtggattggccttgccagccgaggcattacataccggccctgatggacgaactttcgtcacttatcgccgtgaattaaacgcacaaacccagcagattgtcgtgacaccggggcatgccgttcttcaaggtgtggaggtgatcgggttggaggcaggctatgttgaagttcctgcgcggaaataactgacgcaacctcattgattttttgcgacaccctcgcattgagcgagggtttacggcagtttttgctaattttggtgcaatatctcaccgtgaaaatgcgtatattggaagttcatttgcagtcatatttaaatttttcgtgtctgcaatgacattcgacaatagcgccagatcagatgccacatgttcaatattatttactgcaactaatttgctgttatatatgaagcggaaatttcctttattttgatcaatctgtaatgtcattatttctccgacaattgcatgttcctgtatggcatttttgttcgttagatctttactgtaaccagagatgacagaaataccaatcggccacggacggttgttatgtaatagattgattgtgcgtaatactggctgtctggagaccatatcgcggggataaactctatgttgttcaagcaattgctgttcagacgatattgaatttaaaatctctgtaagacgttgttgtaaattgatatggacctccattgggacgatcatggcgaaaaaggaggaccattttgaagaatgaacagcatctcctgcttgcgcccatccgacttgaaattgagtatcatttgatgtgtgagccaaatagataaaccaagcgcatataatatgttgaacgagctcagttgaaataaaagaactatgattgagtactgttttccattcagacacatgccaatccggtattttatctatcgttgcccgcaatttaaaaggcagcattagtgttgaaaaacgctctagtcttttttgccaaaatagctcttgttcggtaagttgttcatgtatatctgttaacgtcttaatatctgatctttcaattgtggggagttgatcaccaatgtcaagtttgcattgattggctaaggtgagtgcatttattgggttgccacggctattaacaaacgaaatacgtatatcttcactacttgtagtcattagccaatggtcctcgctaatacccaacaatgtacctggtttatgatcggaacgtgtatacatcacttgtagtgtgcttatcgataccaggcgatctctcagcagaactttaggtaatgtgagtggattaggatagtaaactccgaaagttaaagatctgaccaaagatgacaattcctgagcttttttattccacaatagacagccagcagcgtctggccggcgacgtcttgagaaaaaattgcggttatcaggatcttgttgtcggcggggtatatcaccgttctctaggttgtttaatagttcggtaaatccttcggcagcagcctgataacatttaagattcagtgaaagtgcggtgtcggtatttttaagatcaatatgacgttgcacaacaatatcgccgctatcgaccatagatccgattaaatgccaggtaatagcatactgagactcaccggcaaggatagcccaagaagtggcatggctgccggcatagcgtggtagaggggcgtcgtggtagttgaaagcaccttgagagaactgattgattaatagagtagggagaataactggattgactatggaaaaaagccagcatattgactcagttttggagagcgtcaagagatcttctagtgcttcaacacagtgtatattttgagaagttgcccattcgaaaaacagagattccgtgggaaaaatagccacaattatgtatccggccgcttgaagttgttgggtacaacgtatcgcaagtgttgtaccaccgatgacgacacaagatcgagcttttctagtggagtggtttacaattttgcacttttcaacttttagtgtgttatcggttagtgtgttatcagtgctattttttttctcttgcgttgaagatgtgaattcgccgggcatgttatcccctttatcgttattgagtgaagggatttgtttgagagtaagtaaagttcataggcttagttgccttgaactgcatttaaacacagacaaaccccgatattgctcacttacctttgattcctttatgagggaagccatagttgcctgaattccagacgatcaacaaagctagcactaacagaacaagtaaggtccacgggaacgagctggcaccaagtgtttcaagtaatatcccgccaataatgcccccggctgcaatggctaaattccataaggtaacaagaatcgactgagcaacgtctgcaccttccccggcagattcggccaatgcagtttgaagtagggcagcggcaccgccgaaggttagcccccataagatcacggcaagaaaaacaaagacaggaagagtaccgataacaccaagtatgagagaggcgaatgtaaatagggcaagacttatcagtaccaacgaacgtaacatcttgtcaattaacagccctgtcatccatattccaagcaacgacgccacaccaaaggctaacaacacaagatcaatcctggtagcaagccccgcctgtgtcacaaaaggcaatacataggtataaagaatactgtgagccagtacccaacaaacaagaacgcttaataccggtcgtactccagggatcatgataacttttttgatcggtatacgtttttcggcagtccgtcctgggtagtcagggactttcaacatgacccatgcgataacgaccaatgttagaatagacatcaaaccaaaagttgtacgccagccaacaattccaccaatgaatgttcctaatggcacgccaagagagagtgccagtggtgccccgacaccggctacagccaatgcacgtccttttaaatgatcgggtaccatccgtcgggcatagccaaccaacattccccagattaagccgcctgccatgcctgaaagaagtctggccgcaagtgccactatatagttagacgttaacgcggtgagcgtattaaagactaacaaacccgtaagtgccatcaagagtaatcggcgacggcgccaaccttgtgttgctgtcgtcagtggaatcgcagcgacaagtgagccaattgcgtagagtgtaacgaattgaccagctaatgcttcagaaacggccaagctgtcacttatttgggatagaatgcccgccgggaatgtctctgtgagcagtgcaaggaatcccgtcattgctaacgcgagtagagcaacgaaaggaaaattggtactgcccgcatgagtggcagttttttctttaatcatggaaccccccttaaataattttcattgtgttgtttgcagaagcaatcaactcaagaatcgagctaattcgttaacacctgattccttaagtacctcgaaatgatcaacgttaagattgatattttctgggggatgttttaggtagggtgttgcttcttcgataaaagaaacggcatcgtcacgtgcattaaacaccgtaattggcgccttgattattcgttcttgcagttctgttgctgaatatttctgtccgtaggtttgaataactatcctggcaattcgaacaattaacgtaggggccagagttgggtagtgcttatgaacaaaagagacaaagctttgctcatcgataacgttagccaggcattcattcaacgctgaactgtgagaagtgcccgcaaatacagagaataatagtgatatcaactcattgttttggtaagtagacccgttttctgttcccgtggaattaacgtgatattttatcttcgagagccctggagcgattagaaccaccttttcgacatgttctccggctcgttctaattggtaagccgcttcgaaagccaatacagagccaaaagaatatccccatagcgtgtatgggccagtaggttgtaattttttgatttctgttatgtcttgaatcaccatttcggctatggtggagtatggaacctctccttcattaattccgtaagcttggatgccataaaatgatcgatcagtgcagatctgtgtagccagcaggtgtaaattcattgggtatccacccaatcctggccagcaaaagacaggtaatccagcatctttttcctgtaaacaggccaatcgtgaagataatctggttacttcaccttcaacgatttttgccaattgtttaaccgttgcggcctcaaatagagtatggagaggtagcgataacgcaaattcttcatttaaacgttgtatcagatggacggctatcagagaattgccacctaaagcaaagaagtcatcttcggtagatatgctttctcgcgttagcacttcttcccatatctttacgatctgtgtttctgtcgaggtgcttgggagtacctgtggactgtgtgatactgtgctgaccagtacttgtaatgtgtcgaaatcgatttttccactggaagttagcggcatggtatccaggaacaaaaatctgtcaggtaacatatagtccggtaatgttttgctaagttcactccgcagaattgaagtaatgtcatactttgcttgctggcgtattgtttcatcggctaattcaatacaggcggttaatcgtgtcgaacggtgttgagggtctttttctgccaaaattgcagcgtgtttcacttgatcgataacctctattgcattttttatttcttctaattcgacccgcatccctctcactttaatttgattatctttccgaccagcaaagtgggcattaccctctttatcccaataagccaggtctccggttctataaagccggattttttgcgtatttggtggtattgcaatttcaagaaagtgcttttctgtgagatcctgacgattcagatatcctcttgcgacttgagtgcccgcaatataaatctctccaatttcatattctgaggcgagctgatagtggtgatcgagaataaaaaattccgtattggataccggcttaccaatagggactgaattaacttcgtcagatattgggtagtgattaacaaggaaaactgaagcattaattgtacattccgccgggccatacatattaatcagtagacagtttggtagtgtatggatacattgagtggcgagttttcttgataggctctctgctccgatgaatatttgccgaagggtgtggcattcccggaattgatgattatcgatcagtgcttgtaatagcgtgggaacacactgtaacgtggtcacattgtggcgaataatcaggtcaatgagttggggaatattcctgtgtgttccagatgagctaataacaacccgactaccacaactgactgataatatttcccattgagcagcatcaaagctgatgggcgttttctgaataattgttttttcaatatttaaatcgcatttttcatttaaccaacacatttggttaacgatactgcggtgctcaatcattacacctttcggtttccctgtacttccagaggtataaatgacataagccaagttatctgggctaaggtagtcatggagggtgttgttggtaatggcactggattcaaatgatttctctacgtcttcaagagtcacgatatggatattttctgcaaccaacctgaccaatttttcctttaatttttcttgggtaaatatcattttcagattgctatcgtggatcatgtaacgaagtcgttcctctggataatcatgagacaatggcagatatgcaccaccggcaaaaagagttccccaaactccgatcatctgctcaatcgacggttcaacaaatataccgacgcaatcacccgctaaacatcccaggttttgcagatagcaggccagatgtacactgccaattgccatttccaaataactgagttgctcttcaccgtgaatgactgctgtagcccagggagttgatctgacgtgtgaaaagagtaatcccggtaggcactcttttcgttgaaaactcgctggtaacttaatgttgtttaacgttatccaattttcatttgccggttgagcgctggagatatcgtattttcgatactgtcctgtttttaatatattgcgccattttattattgggagagttgattgcatcttattttatacctttatttaaggagagaagccaaaaggagagcgtatcggcttcttctttaactagctgatatttctgtggaataaaattaaaatattccaacttagaaaaatcatttcctggtcttataaatccttcctttaggaaggggctattcaataaattgcggtaattcaatattattaactatcatgtttgctctttttccactctgacgtttatttattaaatacctgggataaattatctctatcgacttgatgattcttgtatttagcaaacctgagttatctgttttttttattaataaatatgtagatataagataatttctcctaacgcctatactacttgctaccatagactagtgaacagtaggatgatgttcaaaacacttatgaccaatctgtcagcaatgggggaaatatggatagtttgggatcattgaacgtgttcgttcgggctgcggatgcccgtagcttcacagttgcaggtcaacaacttggcatctcttcgtcggcggttagtaaggctattgttcggttagaagagcgtctgggaatacgccttttccatcgatctacgcgaaccgtcacattaacgcttgaagggacattattctttgagcggtgcaagcgaatccttgatgaggttgaggctgctgaaactgaactatcccagatgcagaaaatgccaagtggaaagctaaaaattagcctaccgtcagttggtatgctgtttatgccgaaatttgctgcttttactcgcctttatccagagattaaacttgatataagttgttccgatcgaatagtggatgttattgaagagggatttgatgctgtactccgaaccggtgatccacgtgattctagattaatgtctaggatgcttggttcttaccgccaggttattgtcggctctcctgcctattttgcggccgcaggttttccagaagagcccgaagatcttgttagccatccgtgcttattatatcgctttccaacaaatgggaaattaaacgtatggcctttgaatcgtgatggtaagaaaattgagcttaacttaccgtgtaatatggtaacggatagtttagaaccgcaagtctgttttgccgagcatggtcttgggatagcttgtgtgccgaatatcgctgtttaccgacagttgaaagaaggttctttggtcactattttggataaatataacgaaagttccacaatttttcgtatactttggccatcaagccgtcatttatcccctaaggtcagggtatttgtagattttatggcggagaacctcttaccttcttaaataaattctgcaaagtggtctatattatagagacataaagtggaaatttactttatgaggttgagcatatattgtacgtaaaaataaattatagaaaaaaaagttgtattaaaacgcagtaagccatcctaaataacataaaggagagtatctaacatgttagtacgtaaatcgttgttggccctgtttgcaactacttccctaactgccgcgggtatcgcttatgcaggtccgcctgtaacggttacatttaagcatcttggtgcgtctggtagcgcagatgctgtttataccatcattactaataatgaatccggtacctatgccaatgcaacacctaaacctagtgcaagtgtagcgccaggaggagtcaatagttatcaggttcaaagcccgctttcacctgacgtaaattatgcaatggtgcgatataaaatagggggtaaaacctgcgaatttatgaccacttttgtgaacggatatgttaatggcgttaaaattccgaaatggaataaaggagcaacgccgagtggtggtgctgtttgtaatgcaaccatcacctatactaattattttacctacgcatggtcagttgaatttacgatgaagtagtgaacactgagtcagattattctatacccgttatctttcaagttgcctctttgttggctgcactcactcaccccggtcacatagttacctatgctcccggggattcgctcccttgccgtcgcggtgtatcttgaaatccatagggtatataagagatagatctggctcatcttgttttttatcatttttttctgatgtagtgattgtaattcaactggctattgtgatttttaatggccgatcggatttcaatgcgaaatagaattccctcgttatctattgtatcggctatataatcgcagatatcacgttgcttttaagtaaacatctcatgactaattctgtctagtgaattgatattcaattaaattcaattaaatactatatgcattgcatatgaattttagattatctgtccgttatattttttgtcttgaattttctgttggttatataattactaaccactactattaggctggttttttatttattgtatgtttggtgtaaataacgaaatatatgcaacatgttagcactaggttaaaaataaaaaaacatacggtaatttaatttattattataaattaatgctgaatgtttattttttttagttttgattttctttggtcttttattgacgcactattggttctacactatttttaaagttggaaagtgttttaattttttataagtttatggattatgatagttgaatatggatgttcagtaaattagttgagtttttcggtataatgtgaatttctatgtttataatttggtgtgaatttaaccttgtaaggaataatatattatgattgatcaaaacaattctaataatatagttacccctaatgtaacgatttctgatgtaactgtgtcctccattcaaattgctccggaaatagccagagacaatgttcatgtaatcattgttgatgacaaaggtgctccacgggattttcttttagataactctgatggtggttatcaagggagtggtagtttaatagctttgattcttgcacatcttaattcaaaaaaagtcactattagaactaccggatatgaatataataaacatggatatatcaacggcgtattaattaaggaggataagggaggtggtggaacaggcggtggaacaggcggtggaacaggtggcggaacaggtggtggaacaggtggtggaacaggtggtggaacaggcggtggaacaggaggcggtgcaggaggtggaacaggtggcggtgcaaaaggtagtgcaggaggtggaagcgggggatgataaggacggtagaaattaggaatgagaattcttatagaaaatattattcgctattatttacgttaaaggtattaaaagtttatcccattatgttattttatttgctattttaaattttggtagtgttcaagatttttgtaaaataacgtctattaggtaagtagtgaattgtaattaattataaatgaaaaccctgatatttaattttcagggtttttactttttaatgactgaatataaactaaattttaggagcagtgttttaatatttctgatcggattttttagtgttttttagtgttttttatttacttgttgacagtgaaaatgatcctgatgattgaataaagaatactatatattatagttatgatttatatgaaaatatttttattttttaattatattaatcagtttgtttatcgtgcgttaatgtaatttaatgggttttattgtcatttaataaagttattatccgaaatcacttattctggtatatgtggtaattgttctagaagacttatggggatttgttctttatttttagtaaataaaacgaggctagccaatagttatctggaaaattcttatttggttttttgatctataccctatggatttcaagatgtatcgcgacggcaagggagtgaatccgcgggagcatagcaaacgatgtgaccggggtgagcgagtgcagccaacaaagaggcaacttgaaagataacaggtatattaggatgttagcgaattaaaatagtataagagttaaatggtcaataaaatattgaccattagggaataccatcaataaggttattaggaactcggttattgcttatgccctaagaagtactttaattcaggtagattaccattttctctaaatctagcaggcgtggtatcaaagtgttttttgaagatccgggtaaatgttgcctgagaactgaaaccatactgtaaggcgatatcaaggattggtaggttttcttcacacagagatcttgctgcttcgtgtaaacgccgcttacgaacatattcacccaaggtatagcctttcacttctttaaacactctttgtagatgccactttgaataaccgcttctgtcagcaatggtcgctatttttataccttcgttacgttgaagctgagtttcgagccatctgacaatatcatttactacactttctgacattttcacctcccactgatggtgggctagttgctaaaatattagatttcgttagttattttcataaagataataacggtagttattaatgagtgtattttaaaataaatccgggatatctataggcaaaaaatgctatttataattgataattattatcatttatgcaaatttcctttgttttaataataagtagcatcaaatgatcttcactaatttacttaaaacagtatcatcgttcgtcgtttaatttaatggaggttgtaatgcaatcggacttggcttttttaactaaaaagttggcattttttgtactttatgctctgattttagccacggttataggtttactctttattgatgttatctatttgcagaatgcagtgaaggagaactcattaactgaaattgctcaggagagtatactgtttgttatttctgctgtatttctgctggaagcaaaaaagaatagtcaattacgtcctgcattagtcttgatatcaggtttttttgcttgtttattgataagagagctggatgctatatttgatgaaatatttcatggtgcttgggcgtggattgctattccgttagcactaatttgtattttttattctgcttataaaggcagggatacgttggctgggcttgttcattttacgcgccatcaaagttacagcatgatggttgcaggtattttatgtgtactcgttttttcccgtttgtttggtatgggagaattatggaaaggtttgatgctcgaacattttgatcgaacagcaaaaaatatggttgaggaagggtgtgaacttctgggttattgcttgtgcctgatttcaactttttggtatttgcctgatgcaataaaacttcgtaagtaaagagtaagacaggcaagcgattgaaataatttgcctgtcaaatttactgttactgcctcaaataaatctgaggctgttgagtctcaggatggcgggtaatgccaagatctgcttgataccattttctcagagtatgatcattcagtacttcttctggtgtacccgcagcgactaacttccctttatgtaatagaaagattttatctgcatagagagcagcaagatttaaatcatgtagaacgcaacacatagccataggttgctcccgtgtcagtcggtaaagcagacgcaaagtgtgttgctgatgatagagatccaaggctgatgtgggttcgtcaagaaacaaacagcattctattggtgttggatgccaaagttgggcaaggacacgagcgagttgtactctttgctgctcaccaccggagagttgccggtagtcgcggtgacgtaacgcttggcaatccgtttgttcaataacggtatcaattgctgtttgtttatgatgaataccatgaggagagcgccccatagcgaccacttcttccacactgaaagggaaggagagtgagctatgttgacgcatgacggcacgagtgcgggctaattgttcagcaggccattgctcaataggtgtgccgtgtaaatcacattgcccatgctcaggttttatatatcccgttaatagccgcaataatgtggatttccccgcgccatttggcccaataatggcgacaatctcacctttatttaccgagagcgaaacattatcaataattttctggttgccaattgaatagcttaaattctgcgcttgcagagaaatattattttttatggcattcattatgtgcggctccctggttgtttgagtatcaaccatagaaaatatggaccgccgattaaaccagtaattaggccaacgggtatttctgctggtgagactaatgttcttgccagtgtatctgcggtaagcaggagagaagctccgcctaaagccgcgccgggaagtagccaattatgatcaccaccaaatcgcattctgatcaaatgtgggacaactagcccaataaatccaataacaccgcttaatgcaacagcgctgccaatcagcagggcgctgagtagtaataactggaatttagtacgttggacatttataccaagatagtgggcttcttcatctcctaattgcagcagattcagtttacgggcttggctgaacgttaggataatagtgggaataattaaagaagctgtaattgccaacgtcggccactctatctggctgagtgaacccatcatccataaggagaattgtcgtaactgttgatcgtcactgatatagctcaggagaccaatagcagacatacaaagggcattgatagcaatcccggcgagtaataagcgggccagatttccgtagttatatttattgagtgaaaaaatcagtaatgaaattaacaggctgccaataaaagcggcgataatatgtccgtacacagtaatgacagatggcaggctaacgggcagaacaattgccattgccaccatcaatgcagctccactgctaataccgagtaggccaggatcagcgagtggattgcgaaataacccttgcattacagccccggaagttgctaaagcacagccaaccagtatggctaatagcacccttggtaatctgatattcagccagatttgccactggggttcactaatggaagattcccataatgtcttgaaagataatgataatgcgccaagattagcagaaccaatagccaacccggacagtaacaaacaaagaaacgccaagcccaaacccggagacttcatacggctcattgagtcttctccgccgcctgtctgagttgtttcatcactgagggggtttcgaggccaaaaccgagtagccccatatcatctacaattaaaacccgttgtttttggccggcaggggtgtgtttcaatccgggtaattgccagattttatccaaaccgcccattgatttaataccatcctccgtcaccaataacagatcgggtgcgctggcaataacaccttcctgggaaagtgggcggtaattgttgaaaccttgcatggcattagtggcaccaacagcgcgaatcattttgtccgctgcggttttttggccggcagccattggcatgataccgccgtgactcatcacaaacagaatacgggtcggcaaggtggttgttggtatttctgccagtgctttttgatattgttgaatcagttgtgcaccacgttcagcctgattgaccgccttagcgacggtcttaattttttcaggaacggcttctaacgctgcttttccggttatctgaatcacttctacaccagaatcctggagctgcttaagtgccagtgaaggctttgccaattcactggttagcaccagtgtcggattcatagagagaataccttcagggttaagcattctcatatagccgacatcgggtaaggtaagcaattcggttggtttctggctggtgctgtctctggcgacaactttatcaccttcaccaagtgcaaaaacaatttcagatacatcgccaccgatagtgacgatccgttcggtggagaaagcactgaacgataccgcaagggcaaatgttagaagccattgtttcatgctacacgctcttcctgtattgattgcagttttggcagagcagccacttgctcacgccactgagtttgttcaggagtgccttctgtacgctgaccaaacagttgcgcaatttgatcgccattagcatcaaatagctcaaggctggtgacaaaaccatcctctgttggtttacgggttacccagctttcagcaatagcactctctattaaatgtagtgtgaaattgcggttaaagatattaatccatttctgatctgagttttcttcctgatggggcatcaggcgttccagctttccggtgaaaatttgtacgcaaccatgattgctgacgaagatcatgatttcattctgatcgttataagcggtgttgataagttcattcagtgcggaattttccaccttgtaagccagatcatcatgtaccgcgttgaaaacctgttgacggctcagattatggtttttaagtaacgtgaagaattgatgaacgttagtcattgctcgccattcttcatcaagctgtgctttcagttcatttgttagagttgaataggtgatttcttctataggtttgatgaccagtgcggggttgtcttctgtctgatatttttcgatcagtgcttcccaggctgtcatatcagtattacctgttgcataaactttatgcaatgcgtcaccctgatgatcaaaaaattgaatgctgtggcgcataccattttttgcgggttcaaccagataaaatacactactccagtgtccaaagaatatccgcaagtcgagttcacgagggttcaagaccagccctgcgtggctgctgaaatgggtatttacataccggccaatatgttcatgaacagcaaaatcattgcgggtgatcgctttaatttcaccaacaacagctaactcttccagtaaagttggggcgtcaacattgaggcgtttggcatcgataccaacgcggctatgtaataattcgccttcactgacattcagataggctgccagatcacgggcatatttggctttgttatcagatttggcttgtagataacgttcataaagtgaagaattcacaatttaactccttgaaatacatttatttaattaccactggtaactgacgaacagtttggcattgcggccatcctgcggtgttccctgtggtgagtagtattctttatcaaaagcattacctaaaactgccgtagtagtcacacctttgagcattccttcaccttgatagctgacatagaaatcattaacgccataacctgcctgttgtttaggatctctacctctagcatctttacctttgaagtcagtatgattggtgaattgacctacccagccgacagagaaaccggtttgtgcaatagggatttccagtatgctagtgatagtatctgggctgaggttatcaagagatccaccgcttttttcatctttaccttctgtgcggttgtaagccagttcccaagagaacagattggattcatagtttatagaagcatcccatccccagatcttggcgctggatatattaacagatgttgtgttccttcctcggttgactatatctgacttaatataatctttggctttagtatcaaagtaactcgctttaaatttcagctcgtcgttatctgctagtagatcattgaaacgtaatccaaaaccagactcccacgtttcgttgctttctgggcggagatttggattaggggtccagaagtttccaggatagtgcatagaatcgttatacatttctcccattgtcggtgcacggaaagcttgagcgtaagaggtaaacagcatcgaccagtcagttggtgtgatactgatagcccctttggaagaccatttatcggcgctgacagcctcatctttagaattgtttcctttatagttgtcatagcgcgtacccgcgacaatagagactggcaggtcgcgcagcgttatctcatcttgtaaccagccggaataaaagcggatatccgcgtcaggaaagctatctgtattaccatctggggtctgtttctgtttgtaagtttcaccaccgtaagtaaattgatgtgccagcgggctgtctgtccacaggcgggagcggttttccaattttacgccataggttttctgtttacggccttcgaaacccttcgccttagtacgagcattaatagtgatatcggaataatagaggtcagttttggcatttaaccaatcatattctgctggatttaattggtagctgagttgggcatcacgttgagttgtcgtgcggtcagtccaagtgctaggatttttattttttccggtgagtgtttgtggatttttaggttgattagcctcattacggtaatagcgtaattgactgctcagggactggttgtcatcaattttccaactgccttttgccattaagttactgataaattcatcattatcgccaaccacaccaccaccgtgacggatgttacctgaatcacgggtactgaaggcaaatacaccatccagggattccgattttgcaaaagttgcaccaccaaaacccatactatggtcacctgttgcaccgcgagcaaaaacgcggaatccgtgatcttgacccgcttgcaaaaggtctgcggcatcgacagtttgataagcgatcacaccgcctaaggcaccactgccgtagagtagggcagaagggccgcgtacaacttcgacttgtttaatgagtgctgggtccaggaacgtaccattgatatggccggtatcggtaccttggcgaataccgtcaatcaacgtcaaaacaccttttggaccgtaaccacgcagactaacatcttgcccattagcacggtttataccggctatattaatgccgggtatttttttgatgagatcgttagcattaccggctgtctgactttgtggtgactgactatttatcaccgttaccatcatgggagcttcgaaactgtccctttcattgcctgtggcataaaccgttatcacctcgcgggatgatttatcactgttagcatcgggcgattttgttgctgcataaacagccggaatgttactgataattgccaagcttaatgctgataatttgagtgttgatcttgcagattgagacatcaggcgaatctccataataatattttatgagttatggatatagctggctgccccgatacgtgatctgggtggctggctgagttattattttatttagttagtatcagcttaccggctttagtttggcgcaattggtagaattctccttggtgaagaattctggtaattcctagctcacctaatagttgtttactgtcaatgtagtcaatttctacaatttcagcaggataagtgttgcattgttttttaagtgcaatgcaagaatgttggtgacatattttagtcataaaaccactttgcgaatactaactattatcatagtgagaattattatcgttatataaagaggtgacttcaagcaatatttttggtggtcaggagcaacacattaatgaaatttaattaatgtgttgtcagttagcctcttatgaatgaaaaaggctaactcggaataaggattcagaaacggtaacttactgcttcggcgagaatgtcaataagctgttctgtatcttgccagtttagacaaggatcggtgatcgattgaccgtaatttagcggttgtccctgaatgacttgctgggtgccttcaaccagaaaactttcaaccattacaccgacaatagcggtagaaccctcttgaatctggtgacccacctcttttgctatagtcagttggcgtttatgaattttttgacaattaccatgactgaaatcgataactaaatgttctggtaaattaaattcacgtagttgagtacaagctgtagcaatatctttggcactgtaattaggctgtttgcctccacgcataataatgtggccgtatgggttgccttcggtttgatagatggtcatctgaccgcgcttatccggcgagaggaatgtgtgacagaccccggctgcgcggattgcatctatggcgatacggatgttgccatccgttccatttttaaagccaactggacaggagagggcagatgccatttctcggtgaatctggctttctgttgttctggctccgatcgcgccccaactgatcagatcggcaatatattggccggtcaccatatccagaaattcggttgctgtgggtaaacccaactcattgacatcaaccaataatttccgggccaaagtaataccccgatttacctggcaagaaccgtcgagataggggtctgaaattaaacctttccagcccaccactgtgcgtggtttctcaaaataggtgcgcataataatttccagtctgtgctggtatttttcacgtaacctgttcagtcgctgagcataatctaaagcagcatcaatatcatgaatagaacaaggaccgatgattaccataagccgtggatcattcccgctgagaatatcggcaatacgtttccgtgacgctgtcacattattgacgattttttcggatacaggaaattgaattgcaagagtttgaggtgtgactaaactatcgacacggtgagtccttaaaccatctgttttgtacatatattttctcaaagttcgtttcacattagcaggcatatctatagataatggaaattacaataaacgaaaacggctaagttaaacaaatgatataattagtcatatgataaatttttttccattattcctattgatatatttttaaaacattcggcggtttagcttcatcatgtcgattattttggttgagatttcttcaacagaataattggtggtgttaagataattaatcttattcttacggaataaagcttcaacttcggaaatttctattctacattgcctcaatgatgcataacggctattttctcgacgttcttccctaatagctgccagccgttcagggcttatagttaaaccgaataacttatgttgaaattgttttaatgtcgcaggtaattgtaaattgtccatatcatccgcagtaaaaggataatttgcagcctgaataccaaattgcatggctaaatagaggctggtgggtgttttcccacagcgggatacgcccaataagataacctgtgcctggtcaaggttacgtaaagagataccatcatcatgtgccagggcataatcaatagctgctatacgtgcatcgtactggctgagattcttttcagtcagaccgtgagtgcgattaagttcgggttttggctctaacccggtttcttgctgtaatggggcgaccagtgtttgtacaatgtcctgacaaaatccttcgctactggtaataatatttttcactccagaagagataatagaatagaaaactaaaggtcttatccgcgtatcctgatatatctgatttatttgttgctttatttcttctgcgcgggtttcactggcaacgaaaggaagagtataagaagttattttgatgggaaattgtgataagacagcatggcccaatacttctgcggtaattgccgtaccatctgaaataaaaaagacagtgcgttcaacgccttcaacactattacgaccattacgttctgctgatgtttctaatctgaattttgccatgatatttacagtgaccttttatctttccaatcgtttagttaaatgaaaccgagagtcgattttctgcaaagtatacctaagaaaaaaataatgtgttgggttgatcgattcacctttctatgtgtgcgaaaacattgtgttagtctatttgtgactgctctatgcagtgctaatttcccgatttgtacccaaatgctaaaaggattgttttaatgcccaataatgacctcaccccgcgtaatgtgctttggtataaccaattaggtatgcatgatattgaccgggttggtggtaaaaacgcctccctgggagaaatgatcactcacctgtcagagttgggggtttctgtcccgaatggtttcgccacgacagcacaggcatttaatgatttcttggaacaaagtggtgtcaatcagcgtatttatgacttgctggatgaaacggatgttgatgatgtcaatcaactggctaaagcaggtgcacaaattcgccaatgggtgattgatacgccatttacgtcacaactggaaaaagatattcaggatgcttatcaacagttgtctgaaggagagcctgaagcctcttttgctgtacgttcttcggcaacggctgaagatatgcctgatgcctcttttgccgggcagcaggaaacttttctaaacgtgcaaggcattgatgctgtgatggttgccatcaagcatgtgtttgcttcattgtttaatgatcgcgctatttcctatcgtgtccatcagggatatgaccatcgaggagttgcactatcagcgggtgtacaacgtatggtgcgttctgatctcgcttcttccggtgtgatgttcactattgatactgaatcagggtttgatcaggttgtttttattacctctgcttacggattgggcgagatggttgttcaaggcgctgtgaatccggatgagttctatgttcataaatcaactctgaataagggtaaaccagcaatcgtgcgacgcaatctgggttctaaaaaactgcatatgacctatgctgacaataaagaacatggcaagcaggtacgtatcgaagatgtaccagcatcacaacgcaatcgtttctctttagctgatgaagaagttgaggcattggcgcgtcaggcgttattaattgaaaaacattatggccgaccaatggatattgaatgggctaaagatggtcataatggcaagttatacattgttcaggcgcgtcctgagactgtccgctcaaaccagcaagttatggagcgttaccaactgaatgaacaaggtcaggtattggtggaaggacgtgccataggccatcgtattggtgcaggtcgagtaaaagttattcacaacttgaatgaaatggatcgcatccaaccgggtgatgttttggtcactgatatgactgatccggattgggagcctattatgaaaaaagcggctgcgattgtaactaatcgcggtggccggacctgtcacgcagcgattattgcccgtgaattgggcattcccgcggttgttggatgcggtgatgcaacggaacgtttgcaagagaatcagtcggtgacagtttcctgtgcggaaggtgatacgggttttgtttatcagaatcaactgaattttactgtacaaagttcccaagtcgatcagttacctgaacttgatgtaaaaattatgctcaacgtcggtaatccagatcgtgcatttgattttgcccgtttgccgaatgatggcgtaggtcttgctcgtttggagtttattattaatcggatgattggtgtacatccccgtgcattactggagtttgatcagcaaactcctgagttgcagcaagagataaaatcgctgatggctggttatgacaacccggttgagttctatgttgggcgtttgacggaggggattgccactctggcggctgcattctggccgaaacgggtgattgtccgtttgtctgattttaaatccaatgaatatgccaatctggtggggggtgacatttatgaacctgatgaagagaaccctatgctaggtttccgtggtgcagggcgttatgtttctgacagtttccgtcgctgttttgcattagagtgcgaagccgttaaacgtgtacgtaatgatatggggttgaccaacgttgaaattatgatcccgttcgttcgtacggtagcgcaggctgaagcagtgattgctgaactggcatcccaagggttgaagcgcggtgaaaacggattgaaagtcattatgatgtgcgagattccgtccaacgcaattctggcagaacagttccttgaacattttgatggtttctctattggttctaatgatatgactcaactgacgcttggtttggatcgggattctggggtggtatctgaactatttgatgaacgtaatgatgcggtcaaagctctgctctcattggctatccaagcggctaagcgtcaaaacaagtatgtaggaatttgtggtcaggggccttcagaccatcaggattttgctcattggttgatggaagaagggattgatagcctgtcattaaatccagataccgttgtaaaaacttggttaggattagcgaaagtgagttaattgagaataatactcgattgaaactaaaggctcgtcaaaataatggcgggctttttaacaacttgagtcgttaattatagttctacgggaaagtataaaaatagcgaaaaaaaaagcctatcatgggcgtgataggcaaggactacacacagcaatataggcgtttctaacaagtagaaccatcaaaaggagaaataaacgtctcgttcatagcccacttatattaatttagttaaatagtttattcattaagaattgtcctaatttcagtattatttacggctaaaatgagccaaatttaactattttttaacaatttattcacaataatgatatttaataaatcagcacctcagaaaagtgagaagttttattaaaattatgctttagcgaaagagctaacactctttcgctatataagtcagaattcattatcataaaaatttattctgaaaatttctgttccagatatttttcagtttcggctaaatcattttcaggttctgggacttcattcatccatgcgattaataaacggtaagcaacggctaatacaacggggccgataaataagccaatcatgccaaatgagagtattccaccaataacgcctattaatatcagcgccataggtaaatctgcgcccagacggattaaaaatgggcgaagaaatccatccattgtcgttacgatacagctccagaccagtagcacggttccccaggttgtatcacctgtccaataaagccaggcaacagcgggaactaaaatcagtaatgggccgagttgagcgacgcaacagacaaacatgagtactgtcaacaacgtagcataaggaatgcccgaaacagccaagccaagaccaccgataatggcttggaccaatgcggtaaccaccacgccgagcgcgacggcacggatggattgtgctgccaacaggatggcggcatctccgcgtttatttgccaggcgaatggcaaaatggcgaatactcatcgtcacctgttcgccttttagatataagagcacgctgaatagcaccatcaaacagagatggaatacaaaacgcccggcatttgccgcttgagtaaagaaccaggttgctgcttctccaacataaggctggactttagctatcagaacattgccaccgtcagtaataagtgagttccaagcgctgtaaagtttatcgccaaccagagggatactattcagccaggtcattgtcggtatttgaaaatgagagggggatttagtccactggattaatggcgcgctgttttccaataagctactaaccagtaatgcgatagggatcacgaataatagaattagcagtagcgtcatgatggagaccgcaatccagcgtttaccccacaagctgtcctgtagtttttctaataatggccaggtggcgataacaaccatgccggcccagacaaaaccgaagataaagggttttatcacccaaaagctggtaacaattaacagtgacaggaaaattaaagtaaataatagttttggcaggtcataatacggttgagatttgtccataagttaatttctctcagggagttagtggcgctaaggtgctaaagataatgaataaataggatgttatctatacctgttatctttcaagttgcctctttgttggctgcactcgctcaccccggtcacatcgtttgctatgctcccggggattcactcccttgccgtcgcgatgcatcttgaaatccattgggtatataggttactcaaaataggtgaatattatgataaggtaaacgcttgccttatcagacaaatcagttaacggtagtaaatggttacggctgattaaggcattgattcaaagatagtataaatggagcaatgtggacactcattttaaaagggtcaaaacgataatgatcccacgcatatcacaagcaccgcacgtcagtgaggtggcgcagaagttcttggatacattgaaggaacaaggatttaccggagatgttgccagtagttatgccgatcgtctgacaatggcgacagataacagtatctatcaactcttaccacaggctatcgttttccctcgatccagtgcagatgtggttttactggctcgtgtcgcaggtgaaaaagagtatcagaatttgacatttacgccacgcggtggcggtacaggcacaaacggccaggcgcttaatgacggcattgtggtggatatgtcccgttatatgaatcgcattcttgagattaacccggcgcaaggttgggtcagagttgaggcgggggtgattaaagaccaactgaatcaatatttgcgtccatatggttatttcttttcaccggagctttcaaccagtaaccgtgcaacattgggcggcatgattaatactgacgcatccggtcagggttcattagtctatggtaaaacttctgatcatgttcttagcctacgggcagttctattagggggggaattacttgacacccgcgctatggatatagtccaggcggaatcgattgcgcaagaggattcggttaccggtcgcatttataacacggtgcttagccgctgccgtgaacaacgtgaacttatcgttgaaaaattccccaaacttaatcgctttttgaccggttatgatttgcgccatgtgttcagtgatgacatgcggaaatttgatttaggtcgtatcttaactggttcagaaggaacgctagcttttattaccgaagcggttttggatattaccccgttgccaaaagtcaggcgattggtgaatgtgaaatatgattcatttgattctgcactgcgtaatgctccttttatggtggaggcaaaggcattatcggttgagaccgtggattccaaagtgctgaatttggcgcgtgaggatatcgtctggcactcagttaaggaattgataacggatattcctaacaaagatatgcaggggttgaatattgttgaattcagtggcgatgatcagcctttgatagaccggcaagtagaaacactttgccagcgccttgatgaactgatggatggcaatcaagctgggattattggttatcaaatttgccgagagttagctgatattgagcgtatttatgcaatgcgcaagaaagcagttggcttgttgggtaacagtaaaggtgcggcgaaacccattccttttgtagaagatacgtgtgtaccgccacagtatctcgctgattatattgtggaattccggcagctattggatagccatcatcttaattacggtatgtttggtcatgtggatgcgggggtgctgcatgttcggccggcgctggatatgtgtgatcctcagcaagagatactgatgaaacagatttctgatgaaattgtcagtctcaccgcacgttatggtggtttgttgtggggagagcatggtaaaggatttcgagctgaatacagcccggcatttttcggtagcatcttgtatgaagaattacgccgaattaaggctgcctttgacccggataaccgtttgaatccgggcaaaatttgtccgccgatgggggttgatgcccctatgatgaaagtcgatgctgttaagcgaggaacgtatgatcggacaattccgataaatgtcaggaatacattccgtggtgctatggagtgtaatgggaatgggctctgttttaatttcgatgtaaaaagcccgatgtgtccatcaatgaaagtgagtcagcaacgtatccattcaccgaaaggacgcgcgacactggtgcgtgaatggctgcgtcttttaactgaacagggggtagatccgacgttactgaaacagggattagaacaaaaacgaccaagtttgcgtgggttgattgagaagactcacaatagttggcaggcatggcgtggggagtatgacttttctcacgaagtgaaagaggcaatgtcgggttgtctggcatgcaaagcttgctcaacgcagtgcccgattaaaattgatgttccgtcatttcgtgcacgttttcttgagttatatcatggccgctattttcgccctttacgtgatcatattgtggcgagtgcggaaagcagtacaccattaatggctaaggtccctcgggtcttcaatttcttcctgaaacaaccgtggatacaagaattgagtcgccggactatcggcatggtggatttacccttgttatccagcccgacgctgccccaacaactggcgggtcattatgcactttcgaccacactggaacagcttgaaaaaatggaacaggctcatcgtgacgaacatgtgttgattgttcaggacccgttcacgagctattacgatgctaaagttgtggctgattttgcctatttggtagaaaaattgggatataaacccgtattgctgccattttctccaaacggtaaagcacaacatatcaaaggcttcttatcccgttttactaaaacggccaaaaagacgtcagactttctgaaccgggttgcggagttgggtattccaatggtgggtgttgatccagcgctggtgctgtgctaccgggacgaatataaagaaattttgggagaacagcgtggaaagtttgaggttcagcttgttcatgaatggttgattaataccttaccggagaaaagtgaccatgaagaaaaatccggtgataaatggtatctatttggacattgtaccgaagtgactatgctaccgggcagtagtcaacaatggggaaaaattttccatcggttgggtagcaagctggataatatcagtgtaggctgctgtggcatggccggaacctatggtcatgaaaacaaaaacatagaacactctattggtatctataagttatcctggcaacctgccttgcagaaattaccattggagcgttgtttaagctccggttattcctgccgaagtcaggttaagcggatagaagggcaagtacttaagcatccgttgcaagctttattggagataatcccatgatttggaaacgtgatattggactggatagcctgaatcaagtaaatagccaatgtatgatgggccatctgggcataaaaatcacgcatatcggtgatgactatatcgaaggcacaatgccggttgattatcgcacgcgtcaaccatttggtttattgcatggcggggcatctgttgtgctggcagaatcactcggttctttagctgggtatctctgttccgaaggtgagaaaaaagttgttgggctggaaatcaatgctaaccatattcggtcggttcgtagtggtgaagtgaaaggcgtatgtaaacctcttcatattggccgcaatcaccaggtgtggcgaattgatatttttgatgagcggcaacatttgtgctgtacctctcggttaaccacatcagttttgcctggataaaatgaaggtaggttatttaatagaaaaataacctacttattaagtgaaatggttatttatttacgtattaaatttaattgtgataatcctccaagaaatagattttttatagatattattgatgtttttataatattattatttgtacaaattgtgttttcatatatcttataaaattaaatgttaactggaacagaaatggcagattatatgagggggattgatgttggtatagataataatattccacatcatgaaatagtgaggaaaatatatttatgctatccaacacatgtttttcataataatgaagagctacaatatgaaatatttaatcagattagctctaaattttgcataccattttcgtcaatacatgttgttggatctgcaaaaattggtcaaagcatatataaatcttctacgttctctccaggagattctgatttagatattgcgattattagtaatgagttatttattaggtactcggaaattgttttttataaaacaaaaggatttcaagatataagagactttcctcaagatagagagaataatagaagtaaatttgcacaatataaaaattgtatttctaaaggaatatttaggccggatttaatgccgtattgccctgaaaaagaagattggttctcattttttaacaagttgtctcaaagttatagatgcttatttaaatctataaatgctggtatatatcaatcacaatgcttttttgaaattaaacaatctgatataattgaaaaatatagagagggggtaatatgatagattatagagttcgctcagtttctttactaaatttagtgaatgatattcgtagtaaaaaattaatacctgacgcatattttcaaagaaatttggtttggcgagaaaaacataaagtagattttattgatacaatattgtctggttatcctttccctcagatatttatatcgaaagggaaaattgatgtggatagaatgataacagtttcttgtattgttgatggacagcaaagaacaaatgcgataatggaatttattgatgataagtttcctgttaggaataaatattttaatgaattagatggtgatgagaaggctaattttctaaagtatgagatagcagtcattgagcttgatcttgaaaatgacgatcctaaggttaatgatatatttcagagaattaatagaacatcaaattctttgacaaatatagaaaaattagcatctcaatattctacatcagattatatgcttgttgcgaaattattgactgatcagatcgatatatcttggatagaagatggggaagctatgttcaaagaagatccaaatattcctgtagaattctattcttgggcaaaaactaaggaagttaataattttagaaaattaattttagagaaaggtatttatacatcaagcgattttattagaaaagtacatttaattcatatattgaatattatgtcaacgtatttatattcattttttcataggaatgaaaaaacatatgattatttgaatagttattcttatgtgtttgaagaaaaagacgagcttattgataattttgaaaaaacagcttatattatattaaaaatgaaatttactagtaaatcctattggttgaataaagctaatttttttactttattcttgtctattgtaagtaatgttagaaataaaaatattataaatatatccttacttaaggaaaaactgaattatttttcagatcatcttcctgatgattataaattggcggctagtgaggctgttaatgataaaaaagaaagacagttaagggctgtatatatagataaaatagtttctgaatgtgttagctgtcagctttgaactattttttttaaagcggcaaggcttcctaattattatttggctgattgttattttaatccggaggataaattattctccggtatattttaaaccctatcttaaatcatgcctctttatgaactttttgtgcttttattttacgctaataagtaaaatatagcacaattgatcaaactaataatttatagataaaagttaccttttgcggtaattgaattgagttatgataacctttaagaagtatatttatggagcttgtgggtgtttttataatattatgggttgtttgattgtatatgtctgatgaatagaaatggtgaattatcttaaaagaattaatactgtaatagggaaagatctaattgaaaattcttactaaaatctataaatgctgatatacccgttatccttcaagttgcctctttgttggctgcgctcactcaccccggtcacatcgttatcgatgctccaggggattcgctcctttgccgtcgcgatgcatcttgaaatccattgggtatatatcaattaatgctaaagtttcagtgactgtaattatgtttaattccgattaaatatgaagggtgcctgagaaccaagtcataacaacatctaaaagggcgggagtaaaaacctcccgcctaaggttgccttacctgtcgctggattcgtaagccatgattgccgcaacctctgtattacctcgtttgatatggagtttacagattgaaccccttgttatccacgtgaatatgagtaatgtcacacaaataatgatcaaactaaatattgcgattttttgcggcttcatagccttctctccttgctttttgtcaggtaagaggctagccttatgttgctgatacataggagtagcctcatttcgatttatagtcggatggggcttttctctttctgcttgaaacataattcttgcttagaacataatgctcaagacagaaagtctcaagcacccggaggcagtatacttttattcatctaagatgcaagatattgaaaatatttattatagtcacgtaataccttctaattaaattaaccagccagtatagctattaataaagaaaggaaagaatgttgatgatggaatatatagataaaatggtttcttaatgcgtttgattaattgagttgattaaatagaaaatatataataacaacctctattttacatctccggttaacgatgttgcacttattatgtgaatccaagaatgccagagtttcagtagctttaatttatgcttaattccgcttaaatatgaagggtgcctgagaaccaagtcataacaacatctaaaagggcgggagtaaaaacctcccgcctaaggttgccttacctgtcgctggattcgtaagccatgattgccgcaacctctgtattacctcgtttgatatggagtttacagattgaaccccttgttatccacgtgaatatgagtaatgtcacacaaataatgatcaaactaaatattgcgattttttgcggcttcatagccttctctccttgctttttatcaggtaagaggctagccttacgttgctaggcataggggtagcctcatttcgatttatagtcggatggggcttttctctttctgcctgaaacataatgcttaagacagaaagtctcaagcacccggaggcagtatacttttattcatataagatgcaagatcttgaaaatatttattattgtcatgtaataccttcgaattaaattaaccagctaataaagctattaataaagaaaggaaggcgtgttgaaaatggaatatacccgtcatctttcaagctgcctctttgttggctgcactcactcaccccggtcacatcgttatctatgctcccggggattcgttcccttgtcgtcgcgatgcaacttgaaatccatagggtatatatagataaaattgtttcttaatgcgtttaattaattgtctcgattaaatagaaattctatttctatatattatgatcataatgacaatctctattttgcatcttcggctaactatgtcaattttatctggttggctgctattttcatactgggaaaggaactattttcccgtatatctgaaagttcacatcaaatagtgtttctgatgaactttttgtgcttttattttacgctaataagtaaaatatagcacaattgatcaaactaataatttatagataaaacaataaattaaagatataccttcatgtgaaatgaacataaatcatcgtatttgtataaaatttgggctgatcaaggtatatcctcttaaaacaaatggttgaagtgataaaggttatcattaccattatacaggaggagagcactccgataacggcggcaagaatagctatagaataaatgtgaggtcaactatgacaaacagtgttgaaaccttttctctgaatgaaaccgcatggcaaggaatcaccatcaccgcgagagccgcagcgcagatcttaaagttgatgcagcaaaacccacaaagcaaagggttatatctgggggttaagcaatcgggatgtgccggctttggctatgtgtttgagatggttaacgatcccgcacctgatgatctgaggtatgaaaatgaaggtgcatgtttatatgtccctctgaaagcaatgccatttattgatggtacggaagtggatttcgttcgtgaaggtttaaatcagatatttaaattcaataatccaaaagcacaacatgcctgtgggtgtggtgaaagctttggtatataagtgtaccaatatatgtctcagagcaatgtagaaatcagtgatgatgtgcagacttggctcagcgatcatcgctataaagaaggcttctttactcaggtagcgacggatgagctagctaaaggtttgagtgaagatgttgtgcgggctatttccgcaaaacgcaatgagcccgaatggatgcttgaatttcggttggaggcttatcgccattggttaggaatggaagaaccccattggttgaaagcgaattatcctaatcttgattaccaggactacagttactattcagcaccttcatgcggtgcttgtagtgatagttgcaattcacaatctggtgctgttcaagggacagggtcggagcaagctaatagctatttaaccgcggaaattgaagaaacatttgataagttgggtgttcctgtacgggaaggtgaagctgttgcggtagatgctatttttgactccgtctctgtttcaacgacctatcgggataagttagcgaaagaagggattattttctgttcatttagtgaagcgatacaggaatatcccggattggtccgtaaatacctcggcagtgtggttgcaagccacgataatttttttgccgcgttgaatgccgcagtggcttctgatggtacttttgtttatgtgccaaaaggcgtccgatgtccaatggaactgtccacctattttcgtatcaacgcggcgaaaacgggccaatttgagcgtactatcctgattgctgatgaaggcagttatgtcagctatatagaagggtgttctgcaccggtgcgtgatagctatcagcttcatgctgctgttgtcgaagtgattatccataaagatgccgaagtgaaatattccactgtccagaactggttttccggtggtgacagtgctgggggaattctcaactttgtcactaaaagggcattatgtgaaggcgaaaatgccaaaatgtcttggactcaatcggaaacaggttccgcaattacttggaaatatcccagtgtgatcttgaaaggggataattcgattggcgaatttttctccgtggctttgactaacggtactcagcaggcagataccggtaccaaaatgatccacattggccgtaataccaaatcgaccatcatttcaaaaggcatttctgctggccgtagtcagaacagttatcgtgggttggtcaaaatattaccgggagcagaaaacgcccgtaactatacccaatgtgactccatgttgattggtacagaatgtggtgcacatacattcccttatgtggaagtacagaacaatacggcgcaactggagcatgaagcgacaacctcccgcattggtgaggatcaattgttctattgtttgcaacgtggcatcagtgaagatgatgctatttctatgattgttaatgggttctgtaaggatgtgttctctgaacttccccttgaatttgccgttgaggcacaaaaattgctggcgatcagccttgaacacagtgtcggatgagttttccctgtttcccttttttatgacagaacgttaagtcgttcgaaggcatgtaatatgttaagtattaaaaacttacgagtcagtgttgaaggtaatgaaatcctaaaaggattaaatcttgacgttaaaccgggtgaaattcatgccattatggggccgaacggttccggtaaaagtacattatcagcaacgttagctggccgtgaagagtatgaaatcgatgatggtgaaatcacttttaaaggaaaaaatttacttggatttgagccagaggagcgagctggtgaggggattttcctggcgtttcaatatccggtggaaattccgggtgtcagtaatcaatttttcctgcaaaccgcagtgaacgctgtccgccaatatcgccatcaggagccgctggatcgctttgattttgccgattttatcgaagaaaaaattgaattgttagatatgccaccggatttgctgacacgttcagttaatgttggtttttccggtggtgagaaaaaacgtaatgatattctacaaatggccgcgctggagccgacactttgtattctggatgaaacagattcagggctggatattgatgcattgaaaattgtggctaatggtgtgaattctctacgtgatccaaatcgttcattcattattgtgacccattaccaacgtattttggattatgtgaaacctgattttgtgcatgtgctttatcagggaagaataattaaatccggtgatttcagtctggcgaaaaagttggaggagcaaggttatggctggcttattgaccaacagtgaacgaactgaaaaggtgcggcaagttgcagaacgtaaccagcaagcattagcacgttttgctgatttgtaccactgccgtcatggtgaggattcatttcatgccagtttgcattggcagacagccattaaaaccggttttcctcaattcagacatgaagattggcgttatacgccgctggataaattgttaaatcagcaatacagcagcaaaacttgggaattgacagtagcacaatgtgaacagctagcgatttcaatggattgttggcgtgtcgtgatggtgaatggttgtttttcaccgttactgagttcctgtgaatttgggccatatcagctcagtttactggataacaaaagtgggcttcctgcaccgatacaacagggtgagatttttctgcatttgacagagagtttggcccaacagcctttggttattacgttaaaggctgggcaagtggcagaaaagcccctttacctgctgaatataaccagtagtcactgtagtgaagcgttgaatagcagtcattaccgctaccacattgctgtaggcacgaatgcgagcgccagcgtgattgaacatttcgtcagtattgatgggcaacaacctcatatgacaggaggccgattaaccgcggaagtgggggataatgctcatttcacccatataaaactgggggttgagaacagcgcaagctatcactttgcccataacgatattgtgattggtcgtgatgctcaagtaaaaagtaccagctttttattaggctcagggcttggccgacacaataccagcgttaagttgaatggcgaaggggccaatttgtcgttgaacagcttactgttgccgcaaggaaaagaggttgccgatacgcgtacttatttggaacatcataagggacattgtgaaagccgtcagttgcataaaaccattgtgatggatcagagcaaagcggtatttaacggcatgattaaagtggctcctcacgcattgaaaaccgacggacaaatgaccaataacaatttgttgttaggcaaacaagcagaagtggataccaaaccccaactggaaatttacgctgatgatgtgaaatgcagtcatggtgcgactgttggtcggatagatgaagagcaactgttttatctgcaatcacgcggtatcagccgacgcgatgcagagcatatgatggtatttgcttttgctgcggagctgactgaatctattgaagatgaatccctgaaggctattgttatgaaccacattaagcaccgtttagcgagagtggaaagatgactttttctgtaaaaaaggtgcggcaagatttcccggtattaactcaacaggttaatgggcatccactggtttatcttgatagtgctgctagtgctcagaagccggtttcggttattgaacgagaaagtgaattttgtttgcaccagtatgcggcagtgcaccggggaattcataccctgagctctgcggctactcgaatggttgaaaatgtgcgctaccagatagcgcaatttattcatgctcaaagtcatgaagaaattgtcttcgtcaaaggtacgacggaagggattaacctgattgctaacagttatggccgcaagtttatcaataatggcgataatattgttattactgaaatggaacatcacgccaatatcgttccgtggtatatgctggcagaacagattgggtttgaaattagagtatggccattgaatgagaatggcgaattggatcaagcaattttagcttctttgattgattcacggactaaattgctttcttttactcatctctctaatgtgcttggcaccgtgaatcctgtacgtcaaatcataaaacaggcaagaaaactggctgatgagcaggaagggcggttacatattctggtcgatggcgctcaggccattatgcataagcaaattgatgtgcaggatctggattgcgatttctatgttttttccagtcacaaattatatggcccaacaggcattggtgtgctttatgggcgcaaatccctgctggatgctatgccaccttgggaagggggtggcgcgatgataaaacaggtcagcctgcaaaaggggataacctatgcagaaccaccgtggcgatttgaggcgggaaccccaaatattacgggaattattgggcttggtgctgctgtcgattatgtcacttcacttgggctggatgaaattcagcagcatgaacaggcactgatggattatgcaatggcacggctgaaagaggtcaaaaccctgaaattgtatggtcctgagcaacgtcagggggttattgctttcaaccttggccgacatcatgcttatgatgtgggaagtttcctcgaccaatatgggatagcgatccgtaccgggcatcattgtgcccttcctgtgatggaacattatcacgtttccagtatgtgtagggcctcattggcgatttatactacgcaagaagatattgatgcacttgttgttgcattgcaacgaatagaacagttactgggttgagtaaggtatagctcgaaagagtgataaggaaaaagtcatggcaagtttgcccgacacaaataagttgttacgtaatttttcccgttgccggaattgggaagaaagatatctctatatgattgaactgggggcgaagttgcctcctcttactgacgaacaacgccaacctgagaacttaatcgcaggttgccagagccaggtgtggatattactgagaatgaatcaccaaaacaaagtggaatttattggtgatagtgatgctgcgattgttaaaggattggttgcgattgtctttattctgtttcaaggtaaaacaacccaggagattctggatttggatgtgactgaatattttggaaaattgtctttggagcaacatctgacaccctcacgcacgcaggggctgcacgcgatgatacatgccatccgaaataggacaagtaaaatggtttagttgccagtcttacgcgtttcttcagctactgataatatgtacggccaacaaagaggcaacttgaaagatgacgggtataaatttattcaataacattcagaagtcattccaggaagcaagcatgaaacgagttttaacgtttattggcgtgttattgttcagtgggctaactaacacagtcagtgccacagaatatactttgccagcggccaatagtcgtttaattggcgaaaatacgacattggttgtacccgatgatggacgttctttagaggccattgctgctgaatataaaattggtttactggcaatgctggaagctaatccaggtaccgacccttatttgcctgctcagggttctgaactgattattccatcacaaatgttgttgcctgatacaccgaggcagggaattgtgattaaccttgcagaacttagactctactattttcctaaaggaaaaaacaacgtcatcgtgtatcccattggtattgggcaactcggtcgtaatacgccagtgatgacaacatctgtgagtcagctaattaaagatccaacttggacgccgactaagaatatccgtaaacattatgctgaacagggggttattttacctgcggttgttcctgctggtccggaaaacccaatgggcgcatttgcgttgcgcttagcagccgggcgtggagaatacttgatccacggcacgaatgctgattttggtatcggtatgcgggtgagttccggttgtatccgtttacgtcctgatgatattgaaacgttattcaacgccgttcctcgtggaacacgagtacagattatcaatgaagcggttaagtattctgtagaaccaagtggtaagcgttatattgaagtacatcagccattgtctaaaaaagaggatgataatccacagacattacctattgtccgctcagccgatttgaacaagttcattgataataacaagacagataagaatattgttgaacaagcgatggtacgtcgttctggtatgccagtgctggtaagtaaaggtatagagcctgaaacacaacaggatttaccagaagagaatccagaagagaatatcgtgccgatggaagatgatgttaaaggtgcagaacaggcagtgaataacgatgtatctgaatcgtttaaattaccgccgttatatcagcctgggccaatctatcgggaaaattaatattttattgcggacaaggaagtcagcgaatatttacctgacagaatctgatgataaaaaaatggcacacagatggactgtgtgccatttttgtacataattacaaaaaattattttttgtaggaacgaacttgattatccagacgctgattcgcacgagctgcatcgtctttagcggcttgaacgtcagtatgtactgcgttcacgtcattgctcagttgatcaacttttgcattcagagtctgaatatcagaagtcagttggtcaaccttagcagtgcttgaacaaccagccaacagagtagaagccagaactactgcacccagtacaattttagtacgattcattataataccctctagatttaagttaatctccaagtagccatgtaagtattacacaaagttttttagaaagagaataaatttttatcatgaaaaccaattatttcaatttttctctttagtgagcggataattttcatctaaatgtaaaaaaacaaaaccgttgagtaacattttaatcaaaaaaagcctattccatgagggaatgatattcttcgaaataattttagttaaaaattcttataaataagaaatacaacatccaggtcatcttacctctattgaactatcggagtatctcatttatgaagctatttttttatacataaatttagggtttctcttaaaacaaatttgttaagtaaatcttattgtagatgaataacttgacaatgttcaggttgaatcctaggctcaaattcaaactggtaagaggagtttgttatgttaagtgatcaatctaacgaatattttaacatcagcattgacaacggagtcgctcatttacaactcagtcgtcccgaaaaggcaaatagtttggcgcttgggttttggaaacggtttcctgaaacagtagaacaactcagtcgttcaggtgaagtgcgggcaatggtgatatctgcacagggaaacacattttgtggtgggcttgacttgcaaatctttgcctctagcaaagaggctaatacggctaatcctaatgagcgggaagcgatgcagttcagcttattgcaaatgcaagaggcgataagcgtattggaacatgcccgattccccattattgccgcagtacaaggcgcttgtcttggtgcaggttttgatttaattgctgcgtgcgatttttgttttgctgctgaaaatgcgaagtttcgtatagaagaaaccaatattggtatgatggctgacttaggtattcttcaacgtttgcaacatttgatcccaagtggtatagctcgctatctcgcgctaactggggatacgttgagtgcggttcaggctcatgatttggggctggtggtaaaagtgttcccttctacggaaacactaatcgaaggtgctctcgcgactgcccggcgtattgctgatcggccaccaattgctattaacggggttaaacgagccatgctttacagccgtgatcatggtgtttacgaatcattgcaacaaatagcacttttgcaagcttcgatttttagccgtcaagatatcctgtgctcgattcaagcgaaagcgaccggaacaaaaagtgagttccaaaatttaagtgaagtcggtaaagctttcgatgagccatgattaagacaaagatattgatgatatgtaaagtggattctccacaaataatgtagtgctggaaaatgccatcattgttgagagttaagccattttctgaccgcgagaaaacagagaatggcattattattaatcttaacgggtataatatgacgattgggaaagtaatttggtattggcggagaaaaccagatattcaatatcctgaaacaccgccatatttacggtgtttcagaaataaagcgacttattaaattaaaggacgtgaacagacgacgtgttggttgtgccgcttggaaccagggcaccagataccataaccacgatttcacctttcttcgctaggccacttgctagcgccgcttctttaccaatgcggtagaaatcgtcggtagaggcgatttctttaacaatttgggtaaaaacacccttaacaagcagtaattggcgggcagtcacttcattagtcgttaatgccagaatgggcgcgtcagggaaatacttacgaatggatttggcagatttaccgccataggttgcgaccacaatcagaggggcttccagtttttctgctgtttcaacggcaccacgacacaccgcttcggtcacgcgcaggttacggcaatggacggcttcgatacggcttggcataacgcggtctgtacgttcacaaatcgttgccatgatagtcactgcttctattggatatttgccttttgcactttcgccagaaagcataactgcatcagtaccatccaaaatagcgttagcgacgtcaccggcttccgcacgggtagggcgcgggtttttaatcatagaatcgagcatttgagttgcagtgataacaactttgcgagcgatattacatttttgaatcatcatcttctgggcgaagatcacttcttcaaccggaatttcaacgccaagatcaccacgagcaaccatgatcccgtcagaagcttccagaatttcatcaaaattgttcagaccttcctgattttcaatcttagagatgatttgaatgttttcaccgccgtgcgctttcagatgttcacggatttccagaacatcggagcgcttgcggataaaagaagcggcgacgaaatcaacaccttgttggcaaccaaagatcaaatcttgcttatctttttcagccagggcaggcaggctgatggaaatacccggcagattaacacctttattttcccccaaatcaccgttattcaaaacttggcaaataacctctgacttagtgacttctttaactgtcatgccgatcaagccgtcatcaactagcacggtattaccgggagccagatccgcggggaaaccgcggtaagtgacagcaacacggtctttattaccgataacggaagtgtcagtggtaaaagtgaaggtctgacctgcggttagagagacatcgttaccgccttccagcttcatagttcgaatttcagggcctttagtatccagcaaaatagcggcttgtttacctgtcttagtcataactgaatggatattttgaatacgctggccgtgctcttcatagtctccgtgtgaaaagttgaggcgcataacattcatgccggcattcaacagttcggccagtttttcttcggattctgtttttggtccgatagtacaaacaattttggtttttttcatgacaatctatctacaggttttaattggataaaatagtgagtcgccaactttatggtttgcgcagataccatgtggtgttgaacgttgcgcaacatcattaaggacaagtggcgtggaagacatgcggtgcttttcgtgtgaggttaggcacatgtaattatgcgagcttatatacccgttatctttcaagttgcctctttgttggctgtactcactcacctcggtcacatagttacctatgtgaccggggattcgcgatgcatcttgaaatccatagggtatacatacgattaatctgtaacttttcagtgttcggcaaatcaataagctgaaaccattcaaccctaaatttcgccgtattatagagacttatttctgtgaaatgaatcgaaaaatgattatatgaattaattataacggtaaactggaaaaatgacgcagatcttaacagaggagagttattgctcattgcgcaaactgtttgtaaacaaacaacagtctattttgacgtgggaaataaattaagcacaaccaagagaaaagataataaaaacaggaagatttatttgtagacttggtgcgtccgagtggactcgaaccaccgacccccaccatgtcaaggtggtgctctaaccaactgagctacggacgcactataacccggtgtaatcaatacaaaccggtgtaatcactatgcaattggtgcgtccgagtggactcgaaccaccgacccccaccatgtcaaggtggtgctctaaccaactgagctacggacgcaatctaaattgcattggtgacaacggggacgaatattaacggcgagttagccttctggcaaggggaataacacaaattattgttcaactgttcgtatttgcatctgttacagtgagtttgtcgtttattccaccagttaagtattcatccccggctttagagtaaagtaaattagtgggttgaatgttgtaaaattacctcatctggttgtttttgtgtccatgaaatacgagcaaatatcatcactgctgatgcagtcaggccaataataaagccgatccagaacccttgtggccccatcgcgggtacaatatagtcggttaatcccaggatataaccgcttggtagccccagaatccagaaagcgataaaagtgatataaaagatagaacgcgtatctttatatccacgtaaaacgccagcccctaccacttgtatggcatcagataattggtaaagcgcggcaaatagcatcagatgtgatgccatggtgataacttcaggattgtcgttatacatcaaggcgatcggctctcgcagaataatagaaaaggttgcggttaaacaagcaaataccaaaccaaccataattccggtataggctgatatccgggcattctcgatagattttttccctaaattatagccaacacgaatagtggttgctgcggccaaagatattgggaacataaacattaatgaactaaaattttgggcaatttggtgccctgcaacagcagtaacgcctaaaggagagatcaataatgccactatggcaaataacgtaatttcgaaaaataccgccatcgcaataggcaagccgagggctgaaatgcgtttcaaaatatgccattctggtgcggcaaagcgatgtttagggcggatatccctctgtgatgatgcacgtttcacataccaacgcattagcaggaacatgacccagtaaacgctggcggtagcaacaccacagccgacaccacctaaagcgggcgcgccaaatttaccataaatgaatatgtagttaatcggaatattaatcaataatcctaaaaaactaatcaccatgcctggtttggttttcgataaaccttcacattgattacgcagtacctgataaaacagatagcccggcgcaccccacattattgcgtggataaatccaacggctttttctgccaaaattggatctatattgtgttgcctgtcaatcaggaacttgctgttgtatagaatagcaataatgataatggagagaaaaatcgctagccagaacccttgctgagtttggctagcaatgagattcctgcgaccagaaccgttcatttgcgcaataatgggggttaaagctaatagtaagccgtaaccaaataagataactggcagccagatcgaggtgccaacagcaaccgcggacatatctgttgcactgacgctacccgccataacggtgtccacaacccccattgcagtttgtgaaaattgagcaataatgacgggaatccccagagcgagcaaactacgcgcttcttttaaatacttctgcacgcattacaccttttttattgaaagtagaaaatattaagaaagatatctgtatataagaaacgatttttgaaaaatcaaccgcttactaaccggagtattgtatctatttaataccatattacaacaataatgctgagtttatattcaaatgatcaggtggtatttatcaatgacaacttgatataaactaattaataattatacacaatcattaagaggttcttctatgttcacgggcattgttcagggaaaagcacccttggttgctattgatgaaaaaagtaattttcggactcatgttgttaaattcccggctgaattattgccaggtattgaaacaggggcgtcagttgccaataacggttgttgtctgacggtaaccaaaatagaaggcgatgagattagtttcgacttgatgaaagagactctacgtctgactaatcttggtgatttacagctaggggattatgtgaacctggagcgggcggctaaatttggggatgaaattggtggacatttgatgtccggtcatatcatcacggttgctgagatagctaaaattttcacttcagaaaataatcatcaaatatggttccgtatccatgataagcaattaatgaaatatatcttacataaaggatttatcggcatcgacggaatcagcctgacaattggcgatgttgttaataatcgtttttgcgttcaccttattcctgaaacactggaacgtacgacattaggtaaaaaacgtcttggtcagagggttaatatcgagattgattcacaaactcaagcgattgttgatactgtggagcgtgttcttgctcagaaagagcgggaacgggttgcctctcagcaaccggagacattgatggaagaatgcgcaataaatgaggagcgatagggggaccccgattttcgctttcgaacagaattaaccgtgtgctaaaagggagcattgaacccatcgatgctcctttttgtgatttatattgcagtgttttgcatgtaatgttaactaatatagttaatattgttattattgtgttaatgcgttttctcgtaaagcgcaggttaatccccgtgatgatatttttagaggttacttttttatggaaaacccgattgagttagatgaatggcttgaagaacctacacatgatgatgctgttgaaatgatgaatgcacaagctgtcgtaccttttggtaccgcactttggccttaacggttttttataattaaggttctttataatactatataagtaaggggagtcaccccttacttaaaaataaacaggattgtcctcatggataaaagtcttgaaaatatgtattgttgtttatcacatcatcccgcaatttcggataaagtaagaaatggtgaatgtataaaaatatttatcggatctgatactgagcatagcgatattgcgcagaagatgtatatgtataagaagaatttcgatgtaaagtctgattttgcttttttagaaaaaacatcaccggacgatataaaacaaaaaatatctgattgtgatttgtttatttttctttacgcatcatcaacattaaagaatgcatctccacaagggccagaatatctaaccaaaataagaagctttattactgaatcatggaagaaatctgtattgtttaaagattatggcccacatttcattgaagcatttagcgagccaccagcatcaataacagaaaggaacaaaaaacttattgaattatcaaatcgatcacagaagattcaatatacagataataaagggaactcaattgtaggttatttagaaaaagaccataagtggacttccattgatggcagtggaaatcttgatgttattcctggggaaatagcaagccatataaagcgccttaacggtagtgtcagctttagtggcacttttttgagtacggcaccctttgccataaagtatggggttgtcaatgatatgatgactataaatataaaagagggtgaaattattggatttgattgtgaacatgatgaatttagtcgggattttaatttatacctaaaccataatcacggaaaccgaattgttgaagagtttggtattgggactaacaggggtgtgaaagcgctttatggcagaaatgctggttttgaagaacgacatcctggtttacatcttggtttgggtggtggtgtaaaagggagtcatcatttagatttgatattttctggtggaaaaatagcatttgatcaaacggtcttctttgataatggttatgtgaatgatttccgttagtggaaaacagagcgatctttttaaaattagagttaaacatggatatgtttgttgtattgactaaaagctacagtggaaacctgtagcttttataccctatggatttcaagatggatcgcgacggcaagggagtgtagccaacaaaagaggtaacttgaaagatgacggatatataccctatggatttcaagatgcatcgcgacggcaagggagcgaatccccgggagcatagagaactatgtgaccggggtgagtgagtgcagccaacaaagaggtaacttgaaagatgacgggtatagttaattatcgggctactcgtaacccaccttcaataccttttagactgaatataatttgccacaattggatatcgcgagcacgaaatgcacctgcacaggcgttcagataatagctaaacatgcgtttaaatgttggactatagttattttctatttcaggccagcaggtaataaatctttcatgccaggccatcaatgtgcggtcataatctgcgctaaagttatgccaatcttccataacaaaacggcttttactggtgtgggctatttgctcaatagaaggcaggcagccattaggaaaaatatatttgctgatccacgggtcagcactggttttagttttgttggaaccagcggtatgtagcaggaataagccatcaggtttcaggtttcgttgaacaacgtcgaagtaagtcgcataatttttaggtccaacgtgttcaaacataccgacagaaacaattttgtcgaactgttcatgtaaatcccgataatctttcagaatgatttttacatccagatttgtacattgtttctgtgcatatttctgttgttcggctgaaatagtgatacctgtgacggaaacaccataatttttagccgcataagctgatagcccaccccaaccacagccaatatccaacagagtcatacctggagaaagcgccaatttctcacagatgagtttcaacttatcaagctgagcctgttccagtgttttagcttgtttccagtatccgcaggaatattgcatataagggtcaagcatatgggtaaaaagatcattgcctaaatcataatgttgatgaccgacaatccatgatcgttttggcgtttgcagattacgtaagcgggttattgcgattctcactatatctttgagattattgggcattttattttctaatccggcgcgtaaaacgcgataaaagaaaatatccaaccgttcacaatcccaccagccatccatataactttcacctaatcccatcgaaccttgttgtaaaactcttttatagaaattagcgttttttatctggatatcataagggttgtgaccattaatttgaacacctgcttcttctagcatctcattggtcattctctgccaggagttaatggctgttttcgggtttttaatacaagatgaactcatatactctccaacgttagggtgatggaatactgaggagctcgttttagctagcaaagcaggatgctaagacgcaaaatgcaaaaaataacaaagaatcaaagtaaaaaaccttaaagatgactaatccatgagtttaatggggcagtcattgctcctgaaaacctcaaattccaggttataccttatagatttcaagatgcatcgcgacggcaagggagcgaatccccgggagcataggtaactatgtgaccggggtgagtgagtgcagccaacaaagaggcaacttgaaagatgacgggtatatttataatagggaatgtattgagtataaaagcgtaaaattgttttatcaattaataaataaaggctgcgattaattgataattagcagcctttattgagataataatctgattaatatcaggaattttgttcaactgtttgaatgcagcgatcagcgttttttttccactgtataaaatatcctaatgccattggaacaacggtagaaaccataacagtggttgtggatataagtggattgttgataaatgctgatacaatcagactggcaataaaacagagtcctaattgaagcgtgttttgtaatgcagtggcttttccactgtcttgtggataagcggataaagcgtttgctactgcaattgggtataacgcgccattcattgcagccataaagcaaaaaggtaccagaatagtgaatagcgttggctcgtcaaattttgcaattaaatagagcacaatcatactgatagcatagccaattaacagataagggaaaataatatcactttttattttggctaaaatactgcggcatccataacctccaacgataaaggctagcgtttgaggaatataactcagaccaatgtcgtccggggtatatcccatctcaccgagaattgaaggtgagcctgttaaccaggcaaaaaagccggcgctgcatgatgcaaatatcagaacattgccactaaatagcggtgattttaatagcgtaaggaaagagacattatttgtttgcacttgagtttcacggttgttgcgattttcttgcaagaacagagtaaaaaacaacagtaataatgtaattgccagtaagactaggaaaattatgcgccagccgccatgttgtaacagccaggctcccatcaaaggtgccaaggcaggggagagcgcaaccagaggcataatcgttgcaaaaacacgtttggtacgattggcttcataacgatcaataactaatgcttgccatgagacggcggctgaacaaacacctacggcttggataaaacgcaaaactaaaagttgggtggcgtctgttacccacatcatacccagacagccaatagaaaacagggatagcccggtgatgataatcggctttcggccaaagcgatctgaaagaggtccccacaaaagttgagcgaaggcgaaacctgcaagaaagatgcttaggctggcactgattgcttctgccgatgtcgctaattcttgttgcatagtgccgaatgctggcagatacatatcaatggccagataacctagcatactcaagcctgcaaggtagaacatgaactgacttgagtttttcatttgattactctctttgaatatcatgattgaaataatttgcagtgatatacccgtttctttcaagttgtctctttgttggctgcactcgctcaccccggtcacatagtttgctatgctcccggggatttgctcccttgccgtcgcgatgcaccttgaaatccatagggtataggtagataacaatattgacacatattctatatgtcgtgatttttacttgtgaaatggtaatatttgcatagtgctgtgaaaaaaattgaaaggtaaaattatgtggtcagaatattcacttgaagttgtggatgcggttgccagaacaggcagttttagtgcggctgcattggagcttcatcgtgtcccttctgcgatcagttataccgtaagacaactggaagagtggcttgctgtttcgttgtttgagcgtcgtcatcgggatgtagaattaactgaggcaggcgctatgtttatcaaggaggctcgctctgttatcaaaaaaatgattgatactcgtcatcagtgtcaacaaattgcaaacggctggagagggcaatttagtattgctattgatctcgttgtcaaaccagagcgtagtcgccagcttattcttgatttctaccaccattttcctgatatagaactttttattcatcaggaagtgtttaatggtgtgtgggacgcgctggtgaatagtcgagttgatgttgcaattggtgcaacccgggtagctccagtcggggaaaggtatagtttccgagatatggggtttatgccttggctatgtgtggttagcgctgaccatgcgctgactcagttgccgggtctgttatctgatgaccaaatgcggccttatcccagtttgtgccttgaagatacatcccgtaatttaccgaagcgtgacacctggaatctggataatcagcgccggttggtggttcctgattgggaatccggtttgtcttgtctaaacgagggattatgtgtgggaatggtgcctaaacatagggcaatgccgcttattcggcagaataaactcgccgtgctggaattggaacagcctttaccagacagtccatgttgtttggcatgggttcaaaacagccattctccagcattaagttggctgcttgactatcttggcgatagtgaaactcttaatgctgaatggcttcaagatgaataaaacggattaacgacgatagtcgacaaatggaccatccacgacagaacgtcgctcaaccaagcgtggatgtacttcaatagtttgtgcatcttcacgtttattgattattctgtccagtaacatggaaaacgccatctgccccagtcgttcttttggctgatgaatggtggtcaatgccggagagaaataacgagcgttgcgtatattgtcataaccgatgacagaaatatcctgtgggacgcgcagtcctaattcatcagcagcacaaatcgcccccatagccataacatctccgccgcagaaaaccgcagtcgggcgctgtttttgattcaagatttgatgcatggctttatagcccgattctggttcaaaatccccctgaataacccactcttctttgatcggaatgttggcttcttttaacgcctttaagaatccttgatgacggccaccgccggtatttcgtgccagagggccggggatcgcaccaatatcacgatgaccacgttcgataagataacgaccagccagataaccgccgtggaatgcattatcaataatcgtatcggtgaaatcacttctggcctgtccccaatccatgacgaccattggaatattgcgataatcttccaacattcccaatagctgttccgggtattctgaacacataattagcagtccatccacacgtttttgggccagcatggcgagataggctttctgtttatcaatgttattgtgtgagttacataaaatcagcgtatagcctttgctataacaactgttttcaacagactcaatgatttcagcaaaatagggggcttcactggacgttgccagtaatccgatcgattttgtgtggttaactttcagactgcgagcaacggcactgggtgaataattcagtgccttaatagcagcccaaacagcagctttagtatcttcagcgacgaagcgggttttattaataacatgggatacagtagtggttgagacgccagcgtgcttagccacatctttgatcgttgccatgaggtgaaagactcctgaccttttggtctaaatttaaaacgctttgttaatcgcttgctaaccctttacatcaaggggctagcaataagttagcgataaattctggattttgtctgatctggctcaaaagtgaaagcaataatcagtgttataaaatgggtggtaatcgctatttatgcttttccttatgtaagggcaattaaccatctcaatagattggtttttgtcactataaactttttattctgaggaggctctatgaataccgatttgaagcttggtttatttactgctgtcagcacgttggtgatgattgccatttttgccgctctttgcttgatctttgcctgatgttttgaacgggctagatgatttaaaaattgggcagatagtttctttatctgctctttgtctttctgccaccgcttttaacaacctctacgataaataaccgtgaaaatgatgtcatctgtgtcaggatacgaagagatcaggatacatattagtgagagaaaatggtattctccgcaatatcgtgacgatgttggttatcaacgggctgttggtttaaaggaaataaaaatgacgactactattgagaagattgagcgccaaattaaagaaaacccgattttattgtatatgaaaggttctcctaaattgccaaattgtggcttttctgcgcaggcggttcaggctttatctgcgtgtggtgaacgttttgcttacgtagatattttgcaaaatccagatattcgtgcagagttgccaaaatatgctaattggccaacttttcctcagctttgggtggaaggtgagttgataggtggatgcgatattatcattgaaatgtatcagcgtggtgagctacaaacattaatcaaagaaactgctgataaatgtcgttctcagggcgaaaacgcgacagagtaattttttaattacttacagattatacccaatggatttcaagatgcatcgcgacggcaagagagtgaatccccgggagcatagcaaactatgtgaccggggtgagcgagcgcagccaacaaagaggcaacttgaaggataacgggtatattatgctatccccccatatgttgatatatggggggattattgtttagatttgattatattaatctagccgttcagctatttatccagttttttctgctgttgttgttaatggccagccaccaagttgtttccaacggttgaccatttcacagaataattcagcggtacgatcagtatcatataacgcgctgtgagcctgattattatcgaatgggataccggctgtgatgcaggcttttgctaagattgtttgtcctaataccagaccacctaaagcagcggtgtcaaaagttgcaaacggatgaaacggatttcgttttagtccggtgcgttctgtggcagccataacaaagctgtgatcgaagttagcattgtgagcaacgataattgcccgattacaatgattattttttatccctttacgaaccattttaaaaatagcgtgcagagcttcatattcgctcaccgctccacgtagcggatttaatggatcaatgccggtgaattccagggctgctggttcaaggttggctccttcaaatggctcaatatggaagtgaagtgattcgccaggcgtaagccaaccttcaccatccatttccagtgtaacggcggcaatttcaagtaatgcatctgttttggcattaaaaccgccagtttcaacatcaataacaacagggtaataacctctaaaacgtccactaaggacgtttggcgcttttttgtcagacatcagattgagttacccagagcgttgctggcatttttgttttcaataagttcaattttgtagccatctggatcttcaacgaaagcaataatggttgttccgccttttacaggacccgcttcacgggtaatgctaccacctgctttgtgaatagattcgcaagtggctgcgacatcatcaacacctaatgcgatgtgaccaaaggcattccccatttcataatggtcaactccccaattataggtcaactcgattactgctccttcgctttcatcagcgtagccaacgaaggcgagtgagtatttatattcggtgttttcactggtgcgcaacaggcgcatgcctaacacttcagtgtaaaaattaatggagcgttgtagatcaccaacacggatcatggtatggagtaaacgcataattacctctaatttaatggttttaccaatatttttgtgcggcagatcgcacaaaaaccactaactataacgtgtcttacggttacagttcaatttgtccataattataatttattcttatctaggtttataattaaatatagtatgtggattgtataggaaacgggatgtgatggctgagcaactcgaattttttgctattcctagcccttgtcgaggaatttgtcaggcgaatgagcggggcttttgtctggggtgttatcgcagccgggaagaaagatttaattggatgaaaatgtcagatgggcaaaagcgtgaagtattgcgactgtgccggcaaagatatttacgtgtattgagagcagaaaatcagacagatgaagaaccacctgaacagccatcactgttttaattatcgatttttgaggttattggaattaacaatccaatgatttacttatatagggttatatttttggcaaaattataaatgttctactataattttaagtattttgtttgttatttttttattttttgattaacggaaaggctaagtgagcttatttgaatttctttataaccttatgttttaaatggaattttaagcttgattgcgtgataaatgtaaaataaaaacaacattaatgtaaaaatagatagcttagcatttagatgacagctattcttatagtactttgaataaagtattgaatgatatttattggtttctgcttgcttgtattcatagttctgatagtttttatggtaaaaatattgtatgttaattgttttgttctgagtttaaattaagtttagttgttcttggttatagttacctgaattagttagttactaagaatttactgtgattatacagaagttatatatacttttttaaggctagttttagcctgatttagaaaaatttggctgttatgtttagtaggctagttatttaaggagggacaattggaatctacattgggatcagatctggcacggttagttcgtatttggcgtgctttaattgactaccgtttaaagccgttagaattaactcagactcattgggtaacgttatacaatattagccggttacctcaggagcaatctcagatacagttggcgaaagctatcggtatcgagcaaccatctttagtcaggacattagatcagcttgaggaaaaaaaacttatcacccggcatacttgtgccaatgatcgtcgtgcaaagagaatcaagctaactgaagattctgcatcggttattagggagttagatggtgttattgaatccacaagaaatgagattctgggaggtatttcacgcgaggaacttgcttttctttccactttagttcagaagttagagcaaaatattatccaattacaaagtagatagtaattacgatatccatgaaatgctaaccggatgaaagaagaccgcgacttactagaatgaagtcacggttttcttatctatatcttattgtcgaggtgaaacagtaatattactaccttggcctgcgattcttacacgttggcctttatgaaaggctgttttgccttgtttttgaacaacaatgatgctttcaccactgtcacgacgaatttcgagttctacacctttagttgtgttaagagctccctgaacattttggcccgcgacaccaccggcaattgcaccagcggcagtggctaatgtgttgccactgccaccaccaatagtattaccaacaagtcctcctagaactgcaccaccaatcgcgcctaatacattctcattgctgcccgcctgaatattgataggacgaacagaaacaactgtgccgtaagagacggtttggacctgcttagcttgtccagcagtgtaggtatcaccagaaagagaatcggtgttgacacagcctgataatgaagcaacggcaaccgcgctaactaaaaagtgcttaaacatagtaactcctaatttcgatgcctgactgcggaaatctgatagctcactgggcaatcaggctaacaaccggcattggcaataagtaataaaaagtttattcaaatagaatatcagtacattagcaatctagtgctaaacgtatattaaacgtcaatagagatttttaaaagaaatagctattaatgaaaaattcagcattttttgtgaagttgtttccaaaaatcaggttttattccttcgtttgtctattagtcatatacagccaaaactactgcgctttatagttattggcatggtttctgattttatcgagacagattctaagcaggaaggcaaattaaatggttatgaagtcaggtcgttatattggtgtaatgtcgggtacaagtctggatggcgttgatgtggtgcttgccgcaatcaatgataaagttgttgctcagcaagccagttattcgcatccattcccatacgaattaaaacagaaaattctcgcagtctgtcaagggcagcaaacgacattatcggcaatcggtcggttggattatgaacttggttctttattcgctgaagctgtacaaggcttactgattaaaacagggttaaccgcgagtgacattactgctgtgggatgtcatgggcaaaccgtttggcatgagccaaatagtcatacgcctttcacgatgcaacttggcgacaataaccgtattgccgctttgactgggataactgtggttggtgattttcgtcggagggatatggcatatggtgggcagggcgcgccattagttccagcttttcatttcgccgtattaggccatctgacagaacgaaggataattctcaatatcggtggtattgccaatataacgacgctattacctggatcacctgtcaaagggtatgacacaggtccgggtaatatgctgatggatagttgggtatggcgtcatcagaaaaaaccttatgataaagatgcgcaatgggcgcgagaaggtgttgttaataacaaattgcttgggcaaatgctttctgatcactatttttcacgaccagctcctaaaagcacaggccgcgagtatttcaatatgagttggttggaggcgcaattagttaattttcctgacataccacctgtcgatgttcaggcaacgctggccgagctgacagcagcgtctgtatcacagcaaattatgttgagtggtggatgtgaacgtctgctggtttgtggtggtggcgcacataacccgcagataatgagccgactttctgccttattaccggggacggaggtttgcccgacagataaatatggcctaagcggtgatgatatggaagcactggcatttgcttggttagcattccgtacaatgtcaggtgcgccagggaatttaccctctgttactggtgcgagtactgaaactattttaggggcgatttatcctgttattaatcaataacaatgataagctatcgggtatttagtgagtcataaacagagctacgttaatgtcagaacataacgaatttgatgttgcagaattacgccgtgaatatattcgtggtgggttaagacgtaaggatttgactgaagaacccatcgagctttttgagcgttggctcaatcaagcatgtaacgctaagttgagtgatccaacggcaatgtctatagcgacggtcgatgagaatggtcaaccgtatcaacgtattgtgttattgaagcattttgattcaaatagtctgattttttatacaaatttaggcagccggaaagcaaaacatttggcgcacaataacaaaatcagcctccatttcccttggtatcctctggaaaggcaagtctcttttcttggtaaagcggaacgtctttctcctgttgaagtggtgaaatatttccatagtcgtcctagggatagccagattgctgcatgggcatcacaacaatcttcccgtatttccgcacgtggtgttttagaagggaagttccttgaattgaaacagaaattcttgaatggtgaagtgcctttacctagcttctggggaggattcaaagtgacctttgattctgttgagttttggcaaggtggtgcaaaccggctccatgatcgttttatttatcaacggcaaggcgatagctggcatgttgacaggcttgcaccataaatcgtggattatcatttttaatactagcacttatagtattggcgttttatcctatgccgcactcttttataagtagcgacttatacaacagacaaaatacacaaattgatggagtcattaatgtctagcaataacctgataaaacaactgcaagagcggggcctcattgcccaggtgacggatgagaatgcgttagcggagagactggcgcagggccctgtctccctctattgtggtttcgatccgaccgctgacagcttgcatttggggcatctggttcccttgctgtgtttaaaacgattccagctagccgggcataaacccgtggcgttagttggtggagctacggggctgattggtgatccaagttttaaagccactgaacgtaaattgaatactgaagctaccgttaaagagtgggtggagaaaattcgtagacaggtttcacctttcctcgattttgattgtggcgaaaatagcgctaaaacagccaataattatgattggtttggcaacatggatgttctggctttcctgcgtgatatcggcaaacatttctcagttaatcaaatgattaataaagaggcggttaaacagcgtttgaaccgtgatgatgtgggtatctctttcactgaattttcttacaatctcctgcaatcctatgactttgctcgcctgaatgaagtccatggtgttgagttacagattggtggttctgaccagtgggggaatattacttctggtattgatttaactcgtcgtatcacccagaaacaagtatttggtatgaccgttccactgatcacgaaatctgatggcactaaatttggtaagacagaaggtggcgctgtttggttagatccgaagaaaaccagtccatacaaattctatcaattctggattaacactgcggatgcggatgtttatcgcttcctgaaattctttacttttatgaatcttgaagatattgatgctttggaagaagaggataaaaatagcggtaaagctcctcgtgctcagtacgtgttggcagaacaagtcactggtatggtgcatggtgaagaggggttagcagccgctaaacggattacagaaagtttattctctggcgctgctgctgatttgaccgaagcggattttgctcaattggcacaggatggtatgccggtaattgagttggaaaaaggtgcagatttgcaacaagctttggttaatgccgggttggtaccttctcgtggtcaggcgcgtacgatgatcagttccaacgctgttgcaattaatggtgaaaaacaatctgaacctgaatatctgtttactgacagtaaccgtctgtttgatcgttacaccctgctgcgtcgtggtaaaaaacacgattgtttgatctgctggaaataaccaaggttgcatatataccctatagatttcaagatgcatcgcgacagcaagggcgtggatctaataaagaggcaacttgaaggataacgggtatgatggggcaacaataatgttgcccattttcttacataccctattgatttcaagatgcatcgcggcggcaagggagcgaatccccgggagcatagaaaactatgtgaccggggtgggtgagtgcagtcaacaaagaggcaacttgaaagatgacgggtatattcttactgtgactttaatcttataaatagaaaccaaaataaaaatataggccgtcattgtgaaaaatattctttcaattcaatctcatgttgtttttggtcacgctggtaacagcgctgcggaattccctatgcgtcggatgggggtaaacgtatggccgttgaacacagtacagttttcaaatcacacccaatatgctcaatggaaagggtgtgttatgccggctaaccatcttactgaaatcgttcagggcattgaagaaattgaacagctcaaatcttgtcatgcagtactgagtggatatatcggttcagcggagcaagggggccatattatcgacatagtaaaacgggtaaaagcggtgaatcccgatgcttggtatttctgtgatcccgttatggggcacccagaaaaaggttgtattgttgtgcctggggtggctgaatttttgtgtaaagatgcacttcctgtaagtgatatcattgcgccaaatttgctggagcttgaaacactcagtatgcagaaagtgactaatgtagaacaggctgttatggctgctcggacactatgtgataaagggccggatattgtactggttaaacaccttagtcgcgcgggttatcggactgatcgttttgaaatgctattagtgactaaagaacatagctggcatgtgagtcggcctttggtggactttggcgaacggcagccagtgggtgttggtgatttaaccagcggcttgttattggttaatctattaaaaggtgagtctttacaaaccgccctcgaacatgtcgctgctgcggtttatgaagtgatggtaacaaccaaagagatgggcgaatacgaactacagattgtggctgctcaggacagaatggtggcacctaatcataaattttgggcaatacagttagattaatacccaatggatttcaagatgcatcttgaaagatgacgggtaaagatatttaaccgttccactgatattgtgtggaacggttcttttatctgtaaatcaaattaacccttccgctttcagtgcatcacgaacatttggacgttctgcaatcctctcttgataagctttaagatgaacccgatcagatagatccaattgcactaaaggtgcccaattactgagagtgaataagtaagcgtcagcaacagtaaaatgctccccggcaatgtatggctgttttgctaatacttcatctatgtacttgaattttctcagtagattattaaccgcaacaggacgataattttctggtgttcctggaaaaaacagaggtgaaaatcctttatgaatttcactggaaatatggctaagccattcaagttgacgatatcgttccatcgttccggctggtgcaattaattttttgtccggtttctggtcggcaatatattggacaataacagagccttcggtgaggatctcattgttatctaacagaagagtgggtatctggccttttggattgattgcgaagaaatcgtcgccgttctccgtttttttggttttcagatcaactttaatcacgctgaaatcaagccctgcttcacggagtatgatgtgaggtgagagagaacaagctccaggttggtaataaagtttcatgtatggctccttaaaaattttcgatataatagaacaaaggaactcagtaaggcattgctatagccttgatatatactaccacgatagatggaaataaatgaatgattaaatagatataaggtggtgtgatggtatcgtgaataactcttttctatactctattatagaagtgatttattagtttttttatcgttattttcaagtagattggttgcattaatctagaaatttaaggagagttttggatggaattacttatccaaaacttccccgtattttgtgttatataccctatggatttcaagatgcattgcggcggcaagggaacgaatccccgggagcatagataactatgtgaccggggtgagagagagcagccaacaaagaagcaacttgaaagatgacgggtatatagcatattttacaactgattatattatatggaataaataatggcgattattgatagttgcaaaaattcatcttatattgattataagataattaatatattatttttgttaaatgatttgtaatcataggaaaataaattgaatttatttgtaaaatcactaaaatagaccatgcattgcctatagtttctcgtgaaaatatcttttttattttcttcattaaagttttcgactaactcattgtaaatattattaattgcttttatttgtccattaagtttattgactgaattgtttatatttctaagactaaatgaaatatctggtatgtttaaagtgatttcttccatcaataaagagagtttatatatttgttttttatcttcgccatctggaatattttttaataattgttgtatttttatatgtgttttttctgcgaagtttttcttactttcaaaatcaatttgagatatttcaaagggttgtggcaattttgagatgaaaccgtctagcttactaaaatctgattgaatttctttcaatgcatgattgactctggcaatataaccatgacctaaatatccactgctaagtgaacctaaataagttgttgctttgtgtatatttttaataattctatcaatatcttgttcatcggaattatatgcatattcataatcttccaatgtggatggccagcgatataatgatccactaaattcattccaagaagctgcaatttcttgggatagatcataatttttcaggcattctggtaattttatattggtaattgatttaaacatattggatataattaaaaaatcatttttcattttatgcaccttgctaaaataataaatatgattaaattgtatgaaatcatgaaatataatattaaaactaaaaggttaaaatgataataaaaataaaatattgtactaaaaatattgaactgataatcgactttatgaaattaagttgttgattatattaaaggacatattactgattagtgcaaggaaacaagatgatattttttatttcggtaaaacaattataaggtaatatcatttaactctttaattacaaaggttttaataattctctccaattgttttttatattttgatttaaaattaatttttacctattagtgatgatttaatgaagtgattaatctatttattttattgataataaaaggcccgaaaaacaggcttttcgggccttggcctcatgaattaaaagttactgattattaatcagattatttcaattccagttcattcattgcggcaatgctgaaaccaccatcaacatgcaggatttcaccggtaataccgccggacagatccgagcacaagaatgccgcggcgttaccaacatcttcagttgttacagtgcggcgaattgggttaacggattcacagtgagccagcatcttacggaaatctttgataccagacgcagccaaagtacggataggcccggcagagataccgttaacacgaataccttcagcgcccatggcgttagccatataacgaacgttagcttccagagatgcttttgccagacccattacattatagttagggattgagcgctctgctcccaggtaggtgagagtcagtaaagcagaatttgggttcagcatttcacggcaagtttttgccatagcaacaaagctgtaagagctgatgtcgtgcgcgattctaaagccttcgcgggtaacggaactgacatagttaccatccagttgatcagcaggtgcaaagccaatggagtgaacaaaaccatcgaatttcggccaaattttgctcagttcggtgaacaggacttcaatgctttcgtcttcagctacatcgcaaggcagaacgatagtagaatttagggaagcagcaaattcttcaacacgaggtttcaacttgtcattttgataagtgaaagccagctcagctccctggtcatgcattgcttttgcaacgccataagcgatggagagtttactggcgacgccagtgatcagaatgcgcttgccggtcataaaacccataacagtatccttgtgtgataacgccggtaatgatattcatggattaaaattgctcacagagacaatatcaatatgacgttttattgttaataaacccagtaattctatcacgctagagagaaatatgctgtattttgcgttctgctccgagcagtgattatcgttttctatatgttaaggaatatcctgccgccaggcatcagcggtgagtgcttcaccaaaatggctagcgattaaacggcgggtcatatcgtgcagaggagaagccaacacttctgctgtatttccccgctcaacaacttccccttgatgcatgaccagcacctgatcgctgatatgtttcatcatgccaagatgctgggtgacatagaggtaagaaataccttgtttttcctgtaattccaacatcagattaatgatttgagatcgcatagacatatcgagtgatgctaatgcctcatcagcaataataatctgaggttgtaatatcaatgcgcgcgccagtgctacccgctgtttctggcctgaggctaacatatgtggataataattggcatggtccggtagcaggccaacttgtcgcaatgtctggttgatccgtttttcccgctccattgtattaagcgctgtattaagcagaaggggaatatcaagaatttgaccaatacgctgacgaggatttagcgacgtacttgggtcctgaaatatcatacgaatgcgttggctacgataactgtaatcaccgtaagtgagtttatggccttcgatcatgatttcgccggaagttggctcgatgacgcctgaaagcatttttgccagtgttgattttccagaaccgttttcaccaataatcgccagcgtctgtttagcttttaaggtaaaactaacgggttttaccgcattgagatgttgacgatgaaaaaaacctgttcgatagcgaaaagttttagccaaattcctaacttctagcagagtattaaccaattactgttcctccagatttagtggaaagtggcaggcaaaagcgtggtttttaatcacccgcaaccgtggtgtttcaatacacgttttttgcgcataagggcaacgcggacctaaacggcagccaatgggtaaatgctcaagggatggaatagcgcctgataaggtgtttaacctgcttttatggggcaaagaactaccaaaatcagggatagcgcggcttaacgcttgtgtgtaagggtggtgtggtgttaccagtaattcatcgggaacggcgctttcgaccgtttgaccacagtacagaacattaatgcgatccaccaatttgctcatgatttgcaagtcatgacttatcagtaaaatggtggtgttattgttctgattcaatcgtgctaacagacggaaaatctgagcttgtgtggtcggttccatcgcattggttggttcatctgcaatcagcaggcgtggttggttcgccaatgcgatagcaatcatgaccttttggcactctccctccgttaactcgcaagggaagctactcatgatgtcattatgatctttaattcccacacggtggagtaattcaatagcccggcgttttcgccatttgaaacgttgccaccaacggcctttgtaagtccagcaggggatagcttgaatgagttgccgaccaatattttcagaaggatcaagacaggattgtggctcctgaaaaatcattgagatattgtggccgatcacttttcggcgctgacgtggagtcagacggagcaggtcaatatcatcgaagcgaaaacggtcagccgtcactttgagattatctttagtgactccgcttattgctttggcaatcaagcttttacctgagccggattcaccaaccagaccgcgtatttcgccttctatcagtgacatactgacgcgatcaaccgctttaaccggccctttggcagtcataaattcaatagtgagattgcgaatgtcgagtaatggcattattccaccccggaattaattgctcggtgtaatccatcacctaataaattgactaacaagacacagaacataattgccgcgccgggcaacataacggtccagggcgcaacatagattagctccagtgaatcgcccaacatggccccccattcgggtgagggaagttgggcaccaagatcgagaaaacccagtgaagcgatatcaagtatggcgatagaaatggcgcgtgttagctcgttgaccaaggcggcggtaatgttgggtaatacggcgtaccatagaatgtggtaattagaagcgccatccaggcgagcggcaataacatattctttatctagctcatcgtgaacagcgctgtaaactgtgcgaacgatacgtggtaatagcgccaaccaaatagcgattattgcatgctgcaaactggcacccacaaaggcgacgacaataattgccaacaagagtgatgggatagagagtaatgtatcgagaatatgattgagcaccgcggatttcagtcctcgtgtcatgcctgccagacagccgataatcagaccacataaagcggcggccaaagtgactaacagcgctgaaccgaatgtagaggcggtacctattagtaatcggctgagaatgtcgcgtccaagatcgtcggtacctagaaaaaatgcgatattaccgtgatatgaccatgaaggtggcagcaactgatgaccaagaaattgttgatcgagcttatagggggccagatagccaccaaacagacttagggcgatcagaatcagcaccccataaaatcccatcattgccaacatgtcagaatagaaaaagcgccagatgacctttatcggtgacggcattttcttttcacgataaaaattatctaagggcataccattccttatgcttcagagggttagtcattgcgccaataatatcagacagaacattgacagaaatcaccagtgtgccaatcaccataacactggcagaaatggcggaataatcttgctggcgaatggcactgactaaccaatgaccaagccccggccagttaaataccagttctgtcatcattgccagtgtcagcatggtggaaaattgtaatcctagtttcggaatgatagggggcaatgcattgtgtaacacatgacgacggataattgtcagccttgataaaccgcgggttgcggcggctttgatatagttttcaccaaaaacttcttctgtactgtttctcatcaaccgaataacttcggttgtcggtgcaacggcgagtgtaataacgggcagcagcaagtgttgtatggcactaatgatcatctcattacgatagggtgattttgataaccaggcatcaattaatgagaaacctgttacaggttcaatctgatatagcagattaaagcgcccggagacaggtagccagccgagataaagagagaaaaatagcgtgagtaataatgctagccaaaaaatcgggatggaaaatccgaccaaagcaatggagatgataacagtatccgcgggtttgttacgccatactcccgcaataatcccgagggggatgccgacgagtaaggcggtagagaaagccagaatacagagctccatggtggcagggaacacttcccgtagttgttcgctgataagttcaccattaatgctggatacgccaaaatcccatagtaataagctgttgaaatagaagatataagcatcaaatagggatgccccgctgagtggcgcattgggggtaaagtaacttaggctaaagcttatcagtgacaagaaaaacagggtaataatcagcaatagcagacggcggagagtgtaaataatcatttgctacccttctgattgatttggttagtctctttttcccgataaacgccagcgaaagaggtattaccaaatggactgagtactagtcctttaatatcatgacggtaggcctgtaaatgcagagaataggctaatggtaatataggtaattgctgctcaaggacttgttgagccgcatgataatatttaattcgggataataattgctggttaatcaaagcttcccgcaaaattttatcaaatgttggctcacaccaatggctgaaatttgtttgtgaagcgatagccgcacaacttaatagtggacggaaaaaactgtctgggtcattactgtcagttgaccagcctgataatgtcatatcgtgagatttatccatcagtttggtttcctgaaagcggccctcaacaggtttgatgctcatggtaataccaacttgggctaaatcggcctgaatcagttctgccattttgagtggacttggattatatgattgagaggcggaaggtacccataaactcaattgcaagccattcaatccgagatcattaagtattttacgggatttttctgggttatattccgtaatttcagtttgattatcataagcccatgacgctctaggtaaaattgatgaggcggtttccgccgtaccataatagatggattgcatcagccgttggttattaatagcgtaagcaatagcttgccgaacctgtagcttatcaagcggtggcttgctggtattgaaagccagataagcgatattcattcctgggcgtaaagttagacgcaggcgaggatcatctcgtaaaacagtaagctgactggcagcgggatacgctaatacatcacattcaccggttaaaagtttagacatcctgccggtgccgccggcaccgacgtcaataactatctggcgcatttgtggtttgcctttccagtatttatcatgacgaaccagacggataaattgtctggtccgatgatcttccaacataaatgggcctgtgccgacaggtttccagtcaatttgttcatggcgattcatttgatgcaattgttgcccatattcttgtgaaagtattggggcatagtgggttgccaaatgccaaagaaaagaagcatctggttcgttcaaacgaaattccaccgtatattcattaagtttacggatactttgaatagaatcggccagttggaggctgtcaaaataggggtaatgcccgccattgacgttgtgataatagtgttgcttatcaaacagacgcttaaagctgaaaatgacgtcatcagcattcatgttacgggtcggagtaaaccagtctgttgattgaaatgagacattatggcgcaaataaaaacggtaggtagcaccgttatccagtatttcccaatgggaggctaattcagggagtaagcgataagtataagggtcaacatctagcagacgctcatagagttgtgctgccagtgtatcgacagttaaaccgctgctagccagttggggattaaaggtgttcaggttgccattaacacaataaatgaacccttgttgctgaatgtcagtcggaacgtggggatttttttcaggcgtagttattgtttctgcaatagccggtgctgaaagggataatatgatccaataaatcaaactgcgcatatagggcatctgttattaattagaattgacacattgtatctcaattcgcgcttgagcccaaaaaaacgctgcgggaatggtaatgagaaaaattctcaataaagtgctttacaaaacgtattgataaccattatcatctgtatcgctcttccgggaaacagcttttgttatctcaggaaaagcacgacattgctcacattgcttccagtgttttttagccagctcgggtgctggcttttttttatctgtaattcggattacttctcgccgacgttgatatcatgtttcttcattaagcctcgtaattgataataggtcagtcgtagtttctctgctgcttttctttggttaaatctgctctcttttaatgataacgctattaattgtcgttcgctgtcatgttgccactgtttcaaattaacaggcaatgaaggcagaagttgtggagataaatcatgactatcatcaacattggcaataaaatgtggtgtggaggcgaatggattaataataatattatcaagttgagcagaattttcgccgtgacgataaaccgatcgttccacaacatttttcagttcacgaatattaccgggccacgtgtaattctgtaactgttgccttgcctggtcagtgaaaccgggaaataggggtaaatcaagttcgcggcacatctgaatagcaaaatgttgcgctaacaacatgatatcctgctgccgttgccgcaatggtgggatattaaccacatcgaaagccagcctatcgagcaaatcagcgcggaattgccccttagctgccattgcgggcagattatcattggttgcgcatatcagccgagcatcgacttgtaatgattggctgccgccaacgcgttcaagatgcccatattcaatgacacgcaatagcttttcctgaacttgcattggtgcggttgccaattcatcaagaaatagcgttcctccatcagcacgttcaaatcttccttggtgcctcttttgtgccccggtaaatgcgccagcttcatgaccaaataactctgaatccaataaattttcattcagcgccgcgcagtttagggagataaatgggccttgccagcggggagataaataatgtaaacggcgggcaatcagctccttgccggttccgcgttccccaatcacgataacgggtttgcttaattttgccagcgcggatacctgctccagaatttcaagaaagctgtttgcttcacccaataggttttctgtggcgtcattcatggttattttcaccgacaattggttattttagccactttattatgttgtgataaaaagttaaataaaaaaatttatttatatttcatgaaaatagagtaaataaaaagttggcacgactcttgataggatagaagtgacatgaatagtattaaccaaccttaaccaaagaggataatttgctatgagtattttttctcgttttgctgatatcgtgaatgccaatatctcttcattactggataaagcggaagatccgcagaaaatgattcgtctaatgattcaggagatggaagacactttagttgaaattcgctcaacttccgcccgtgctctggcagagaaaaagcagttatctcgccgcattaccgcaggtgaacaacaaatgcacgattggcaggaaaaagcggaactggcgttgaataaagagagagaggatttggcgcgggccgccctgcttgaaaagcagaaagtggctactttagtggatacattgaaacacgaattgaccatactggaagagacacttgagcgaatgaaaggggagattgttgagcttgaaaacaaacttagcgaaacccgagcaagacagcaggcgttggctttgcgtcatcaggcggccgcctcttcccgacaggttcgtcatcagctagacagcggtaaaattgatcaggcaatggctcgcttcgaacaatttgagcgccgtatcgatcatatggaagcggaagcagaagccgtgggcatgggaaaacaaaaatcgttggatcaacagtttgctgaattaaaagcagacgatgaaatcagtgcgcagttagcggcaatgaaggctaaaataaatgctaataaagaacaacattaaatgttggtgcactcaactcaccattaaggaaaagtgatgggctctatatttcttggcattccgctgactatttttgtactttttgtgttacccatctggttgtggttgcattataacagccggaattccaatcaaagccagttagatcagaatgaaattcagcgtctggcagagcgtgttcaacatatgcaggcacgaatcaaaacattggaagatattctggatgcggaacatcctgattggaggcaatcataatgtcgaatggtaaccgccggaaactgtatcgaatacccgaaaagggtaaaattaaaggtgtttgtgctgggttggcctattattttgatgtaccagtacgtttaattcgagccatcgcggtattgtcgctcttctttggcctgtttggttttgtggttgttgcttatattgtactggttttcgtccttgatccggcaccctcggaatataccgaagaggcccatttttcagcacaaaacttgctgaatgaaatcgactatcaattgaaatcgggagagattcgtctgcgccaaatggagcgttatatcacctcagaaacgttcagcgttcgcagccgtttcaggcagctttgatagcaaaaattacctatggctcggctgatacaaaaaaattgttgtaatacttctcacaggagagacatgaaacggctacaaaatgaattaactgcgctggttaatcgtgggatggatcgccatttacggctagctgtaacaggattaagtcgtagtggtaaaacagcgtttatcacatctttggttaatcagttacttaacctccatagcggtgctcgattgccgctattttctgctgtacgcgacggtcgcttgttgggtgtaaaacgggttcctcaacgtgatttaggcgttcctcgttttacttatgatgaagggttgaccgcactttacggcacaccacctgcctggccgaccccgacgcgaggtgtcagtgaaatccgtctggcacttcgttaccgttctggcgattctctgctgcgccattttaaagacactgccacgttatatctggaaattgtggattatcccggcgaatggctgttggatctaccgatgttggcgcaaagctatttggcatggtcacatcagatgaatagcttattgcagggacaaagagctgaatgggcaaaaccttggttggaactttgtcaacagtgcgatccactggcacccgcagatgagaatctgttggctactattgctcggtcctatacggaatatttgattaaatgcaaagagcaaggcttacattttattcagccggggagatttgttctgcccggcgatatgatgggcgctccggctttacaatttttcccgtggccggatatcaaccctatcactgagtcacgatttgctcaggcagatagacacacgaatatcggtatgctgcgtcagcgctttgaatattactgccagtcggtggtgaaagggttttataaagcgcattttctacgttttgatcggcagattgtgttgatagattgtttacagccattaaacagtgggccacaagcatttaatgatatgcgtttggcgctggcacaattaatgcaaagttttcattatggtaaacgaacgctcttccgccgcctgttttccccttgtattgataaattaatgttcgctgccagtaaggccgatcacgttaccgcagatcagcatgctaatttggtttctttactccagcaattggttcaggaagccagacaaaatgcggtttttgaaggtatcagcatggattgtgttggcctggcatcggtacgggcgacagaaagtggcatgattgaacacaatggtgaaagtattccggcgttgaaaggatatcggcttacagatggtaagccgctgacattttttcccggagaggtgccacggcgtttacctgaggataacttctggcaaaaacagggtttctccttcgaggagtttagcccttgtccggtaaatgttgatacaccattgcctcatatccggttggataccgtgctggagtttttagtgggagataaagtgaaatgacggagcctttgaagccaagaattgactttgcagaatccttatcggggccacaagagccggtcttaaagcctgcccagatctttaatgaaaaagagacagcgaatttttgtcctgcttcaccagaacttgaggctgaagaacgcgaaggtcaggtagaagggatagttaatgcagcactgaaacctaagcgtagtggctggcgtaaaatggtatatggttctctgatgttattggggctgagtgcggttgctcagtttgtgcagtggatttatcaatcatggcagcaacaggattggagcgcattaggtgtagcggccgccgggagcatgattgtctttgcgggaataggttctcttgtcagtgagtggcatcgtctttatcggctaagagtgaggtctgaggaacgtgatactgcgagagcgttattgcaacatcatggcgtgggtaaagggcgggaattttgcgagaagttggcaagtcaagcgggtatcgaacagcataacccggcgttacagcgctggcgggctgctttacatgatacacataacgatcgtgaagtggtggtgttgtacagtaaatgggttcaacctgttttggattctcaagtcagggctgaaatcagccgctgtgctgcggaatcagcattaatgatagcagttagcccgttggccattgtcgatatggcatttattgcctggcgtaatatccggctaattaatcgtattgcagctctatatggtattgaactgggatatttcagtcgtattcggctcttccgccttgttttgctgaatattgttttttctggtgcttcagaagtggtgcgggaagtgggtatggattggttatcgcaggatatcgctgcgcgcctttctgtcagagctgctcaagggatcggtgtcggtttactgactgcccggttgggtatcaaagcgatggaattatgtaggccattaccttggatagaaggtgataaacctaaattaggagatttccgtcgtcagctaatcactcaacttaagaatatcctgccaaataagtctaagaatatagttaattaaatgatatatgctttaattctatatgaacgcacaaaatatccagataacgacaatcttttacgttattttattaatttgttttataatcaatcttacaatttgtttattttagtgaaagtttcaaatgctatgttatttgcgacattaaaaaaccggagtccggtcaatttttactgacagaatgcttcatatgaataattgtagagagtagtattttaaaaaattatatgtattaatgtaaataaggtcaaaacagatgcgcttagaagttgtttgccatgatcgaattgggctgacccgtgaactgctcgatctactggtattagagaatattgatttaaaagggatagaaatatctcaaatcggccggatttaccttaatttttcaccagttgatttcaatgtatttcgtaaattgatggcagaaattcgccggattaatggtgttattgatgttcgtaccgtctcttttatgccttcagaaagagaacacaaagcgatgtgtgcactgttggaatccttgcctgagcctgttttttcagttgatctgaaaggaaatattgagcttgctaactctgcggtgtttaagctatttggtgttagtgaagaacaaacttatcaaaaacctatcgggcagtttatcagcggttataatttttcgcgctggtttgaaaataaaaatatccagcaacgtgtggaaaggataacgctcaaaggtctggactacctgatggatattacgcctattcaactgatggatgaaaagcagaaaatgcaatgtgttggcacagtgattatgctcaaatctgctgctcgaatagggaatcaactgaaaaaactgactgtcaatgatggtagtgagtttaaggcgattatcgctgttagcccaaaaatggctcagattattgagcaggcgcgtaaaatggcgatgctggatgcgccactgttgctgattggcgagacaggaacgggcaaagatattctggcaaaagcctgtcatttgcacagcttacgcggaaagcagccctttttggggttgaactgcgcatcgatgccggatgatgtagtagaaagtgaactgtttggctatgctgctggcgcttatcctaatgcgattgaaggaaagaaaggtttcttcgagcaggctaatggtggcacggttttactggatgaaattggtgaaatgtcgccacagatgcaaattaagctgctacgttttcttaatgacggtactttccgccgagtaggggaagaaaatgaagtcaaagtgaatgtcagagttatctgtgcgacacaaaaaaatctggttgaattggtgcaacgaggggaatttcgcgaagatctctattatcgccttaatgtgttggcgattacgctcccgtcgttgcgtgatcgtaaaacagatattatgccgctggtggagtattttattgagcgtttttctgaagaacagggagtaccgaaaccgaaattgtcccctgaactttcccactttctgacgagttacagttggcccggtaacgtaaggcagttacaaaatgccatctatcgggcgctgactcagcttgaaaatatggagttgacgccgcgggatatacaactgccagagtttgaaacagaggtttcttttagtgaagatgtgttcaatggttctctggatgaaatcagtaaacgttttgaacgttcggtgttaacgcgtctttatcggcactatcccagcacgcgtaaactggctaaacgtcttggggtatcgcatactgcgattgccaataaattgagagaatacggtctgagtagcaggaagcatgctaccgaatatgagccggatggtgacgaataaaacaatgcccaccggaagtgggcataaatcatgggatttatttcagtgcggccagtgcgctatcgtaatctggctcattagtgatttcatcaaccagttggctataaatcacgttatcgctttcatcaagcacaatgactgcacgggctgtgagaccactcagaggactaccgctgatggcaacgccataatcttcactgaaagtaccgccacgcagggtagacagcgtgacgacatttgataacccttccgcaccacagaaacgggactgagcaaaaggcaggtcggcagaaatgcacagtacgacggtattttccaaatcactcgctacctgattaaatttgcgtactgatgccgcacaaacaccggtatcgatacttgggaaaatattcagcactttacgctttccggcatagtggctaagagagacatcggagagatctttggctgtcagagtaaaatcttgcgctttttcccctgattttgggaactggccgcttacggagatatcattgccttgaaattttactgtttgtgtcatagttttcttcctctgataaatgaaccacgattgcccagtgtagaagaatattcggctcttgcccatcaaaaatagtgcttgtgagagtaaaattgtctgattgtgtcattctgacaatggcttataatttagtaatgggatatctattttataacagggcagattattaccttatgcgctatttcaatttgatttcttgtgcactacttatcaatagttctcttatcaccgtttctgcttttgctgcggaagttccttctggcactcagcttaatgacaaacaggaactggttcgtcacctaaaagacgaaccggcatccttagacccgattaatgccgtgggtttgaccgaggcgcaagttcagcgtgatctgtttgaagggctggtgaatcaggacgcgtatggcaatgcgattcccggtgtagcaatagcgtggaaaacagcagacaacaaaacttggttttttaccctgcgttctgatgcccgttggtcaaacggcgaacccgttaccgcgacagattttgtatatagttggcagcggttggtcactccggctaatacgtcatcttttgcttggtttgccgcactagcaggtattgaaaatgctcaggaaattattgacggtaaactgctaccagcaaaactgggtgttgaagccattgacaagcacacattaaaggtgacgttaaaccggcctgtgccttattttcccaacctgactgcgaatttcagtctctatccggtcaataagaaagtagttgaaaaatatgggaaagagtggataaaggttggtcatttggtggggaatggggctttcgaattacatgatagaattgttaatgagaaaatcgttctgacatcaaacccttattactgggatcataaaaaaaccgtcctgaccaaagtcacattcgtacccattaatcaagaatcgcacgcgactaaacgctatctggcggatgatttggatatcaccgaatccttcccgaaaaatatgtataaaaaattgcagcatgaattatctgggcaagtctatacgccggatcagttggggacctattattacgcttttaacacccaacgtgcaccaacgaatgatgccagagtgcgtaaagcgctttctatgaccattgaccgtaaaattattgcggaaaaagtcttggcgacaggggagaaacctgcctggcattttacgccggatgtgaccgcgggtttccatcctgtgatcagtgacatggaacaacatacgcaagcagaattggaccaacaggctaaagttttgttacacgcggcgggttacggtccgaacaatccactgaaactttctctactctataataattccgaaaatcaccaaaaaattgcgattgcgattgcttctatgtggaagaaaaagttgggtgtacaagtgaatttggtgaatcaggaatggaaaacgtatattgatagccgtaacacaggcaattttgatgttattcgtgcatcttgggtgggtgattataacgagccctcgacatttctaagcctgctaacttcaacgcatagtggcaatattgctaaattccatcaggcaaattacgacaaactactacaatctgctagtttgcgaacagatgatggcttaagaaacgatgactataacaaagcggagcaaatgattgctgaacaggcacctattgcaccgatttatcagtacactaacggcaggttgataaaaccttggttaaaaggatacccgatcaccaatccggaagacgtggcatatagtcatactatgtacataattaaacactaagggtaaggagctggatgtggaaaccatttatggctcatcattgaaagaggctgatgcagtctatgcttgtcagtttgatggtcaaggcggcatgacaccaattgacatgaatggagtagccacaccagttcaacctttttggcaacatttggattaccgtaaccccaagagctaccgctggctaatggacactgatttgttaccagaaacggttaaagcggggttggctggagagagtcttaggccgaaaataatgcgtaccggcgatggtacgatgattacatttcgaacaattaataacagtgagagtgaacgccctgatcaattagtggtatttcgtatttatattaattctcagatcgtcatttccagtcgccatcgtaaagttcattcgcttgaacaggtactgagtgatttacaaaatggtataggtgcgaaaacgaccgggcattggttggttgaaatggttgatgcaataaccgatgaagtgggtaattttattgaagatcttcatgacaatctgattgagcttgagaatatgattcttgagcaacggatacctgggcggggtgggttagctttgttgcgtaaacaattgattattctgcgtcgttatatggcacctcagagagatgtatttgcccggcttgcgagtgaaaaattactttggatgagtgatgaagatcgttaccgaatgcaggaaatatctgatcgcttgggaagagaattggatgatttggatggttgtattgctcgcacggcaattatttcagatgaaattacatcgatgatggcggatgcgatgaatcggcgtacttatactatgtcattacttgctatgatttttttaccgacaacattcctgaccggattatttggtgtcaaccttggtggtattcctggcaatgaatattatttaggttttgctatcttttgcttattgttattcgggttggttttatttgttgcgtggtggttaaagaaaagtaaatggttgtgaggattaaagagttatttggagagataaaacataactgcgataaagtgttaccaaaattgattcttaatttgagatatatcaatattcactagacatcattgaggcatgatagctctcgcaggtgaaaacaacgttaagcgatgaacgttgttctccgtaattgtagtttttctcacataagtctttatacagaataattgcccattcttgtgccgatattattttataatatcggctttttttatttttcatttgttgttttaggaaaataaaaaaatcgaggcgaaagtgaaagagaagcagaaattaacgctctgaagtatatccagagcggtgtgattaagagcctactccaatagtcctattgggatatacccgttatccttcaagttgcctctttgttggctgcgctcgctcaccccggtcacatcgtttgccatgctcccggggattctctcccttgccgtcgcgatccatcttgaaatccatagggtataggtagtaagaataactatttgacttcaataatatccaaccgttctgattgataattgggttgatcttctatatcaacaacgggttgcatgggtaattcctcgcggtcaaaggcgagatcaccaccatcaatcacctcgctgccgtgagtgatactcttaaaatcaaacagattaaaatcgctgagatgtgacggaacaacattttgcactgcacgaaacatggtttcaattctgcccggataacgcttatcccattcccgtaacatatccttgataacctggcgttgcagattgggttgcgaaccacagagattacaaggaatgatcgggaatgctttggcggttgcatagcgctcaatatctttctcgcgacaataagcgagagggcgaatgacaatatgtttaccatcatcactcatcaactttggtggcataccttttagtttgccgccataaaacatgttgagaaatagggtttgcaaaatatcatcacggtgatggcctaatgcaattttcgttgcgcccaactcagtggctgtacgatataaaatgccacggcgcaggcgggaacagagtgaacaagttgttttaccttcgggtattttttctttcactatgccataagtgttttcttcgacaattttatattcgacacccagttcacccagataagcgggaaggatatgctcaggaaagccgggttgtttctgatccagattaactgcaacaagtgaaaaattaaccggagcacttttttgcagattttgcaggatagatagcagggtatagctgtctttaccaccagaaaggcagaccataatacgatcgccttcctcaatcatattgaaatcagcgattgcttgaccgacatcacggcgtaaacgcttctgtaatttgttcagattatattgttgtttttgatccaccacggacactcgtagataatgtttaaatgggatttaggggaaggagtataccatttttatggcctgacaccttaaaagagtttgtgatagattccgcttatttttacctgttaatgctgatcaattaatagttttttctgtatggaaaatgaggatcgctcatactctaaattctgttgataaccgatatcagaatggagatgaaaatcaaattacggtgttgcaattcaatcatggtctggctgttattcagaatgtcaattatcagccggtaaactttattaaactattagataaatcttccctattgctaatgatagcgggttgttagccgtgaaaaactggaactgatatttgatgtttattaaaactcttaaatatacccgttatctttcaagttgcctctttgttggctgcactcactcaccccggtcacatagttatctatgctcccggggattcgctcccttgccgccgcgatgcatcttgaaatccatagggtataggtttagcacaatgaataatgtttttgaattaagattattattgttgatatgagagaaaatgctacacctatataagtggtaatgatatatatttttatccaatgagttaagctggagggtagattttgaataaaattataagattcttggtgcatatatttgctatcaggatgatttgttttcatttttttccagttaacagcctgtagaaaaacataacgacttgaaactgatcacgcatccttccgaagcgttgtattgttatgcctgttggtaaataaaatccttcttctatatataattcaataattttatccatctttttttgatttattttataaatggctattgatataaccaaaaataaaagagataagaaaagacatattgtcattatcaaatctaatattctcatagttaatttcctataaaaaaatccacagtaaattccgcagttttctcaaatccatagttacctatagccttcctggctacgtgttcttctaaaaaattcttaattaaaaaacggcaagatatatttatcatatgtaagaaatactattccaatagcgaaagataataaactgattaagagataataacaataagaggaattactctgtgcatattcatctccaaaaaaatactcaatagcagatttacccattacattttccatttttattcttaatttgatctccaaattttagtgcgtattttgagttgaattcagttaaaaatataagagtatttatgacataaagccgttactgttgatataaaaaaagatataaaacttatattaatggtgatgaaatatatttttatccagtgggtcaaattggagggtaagttttgaatgaaatcataagattcttgtggcatatatttactaccaggctcatttatccttattcttttccctgttaataacttatagaaaaatacggcaggatgaatctgaccatgaatacccatagaatgaccaatgtatgctgctgatgataagcaaaaacctttttccatatataaatcaataattttatccatctttttttgatttattttgtaaatggctattgatataatgagaaaaagattgaaagaggtataagaaataaccaagatgatgaaagtaactctattcatattaaaacctcattgaatgtccagtatagttaagcgtattctctgaatagaaatgttatcattgttatgaagaagaatacaccacttatattaatggtgatgaaatatatctttatccaatgagttaaactggaaggtaggttttgaataaagttataagattcttgatacatatattttctatccttttcattgattctcattcttcttccagtgagtagcatataaaaaaatatcgcaacctgatactgaccataaacacccaaaaaacggcccagctttacgcctgctgataaataaagtccttttcctatatatgattcaataattttatccattttactttggtttattttgtaaatagttattgatataatgaaaaaaaagaagagaaaaataacggaaatgatggttattaggtctaatattttcataataaatgctctataaatagatctgcgaaaaatcccatagtcttctctaatccatagcatagctagctaagtgtttttctaaaaaaatcttaattaaaaaatagctcatttttgctcgttctgacatataaagtccagcttctgtatataattcaatgattttattgatgttgcgctgatttatcttgtaaatagctattgatattaggtttagcacgaaaaataatacttttgaattaagattattattgttgatatgagagaaaatgctgcacctatataagtggtaatgatacatattttcatccaatgcgttaaactgaagggtagattttgaataaagttataggattcttggtgcatatatttactatcaggctgatttatcttcattttttttccagttaacagcctgtagaagaacataacgacttgaaactgatcacgcatccttccgaagcgttgtattgttatgcctgttggtaaataaaatccttcttctatatataattcaataattttatccatctttttttgatttattttataaatggctattgatataaccaaaaataaaagagataagaaaagacattttgtcattatcaaatctaatatgctcatagttaatttcctataaaaaaatctacagtaaattccgcagttttctcaaatccatagttacctatagccttcctggttacgtgttcttctaaaaaattcttaattaaaaaacggcaagatatatttatcatatgtaagaaatactattccaatagcgaaagataataacaataagaggaattactctgtgcatattcatatccaaaaaaatactcaatagcagatttacccattacatttttcatttttattcttaatttgatctccgaattttagtgcgtattttaagttgagttcagttaaaaatataagagtatttatgacataaagccgttactgttgatataaagaaggatataaaacttatattaatggtgatgaaatatatttttatccagtgggtcaaattggagggtaagttttgaatgaaatcataagattcttgtggcatatatttactactaggctcatttatccttattcttttccctgttaataacttatagaaaaatacggcaggatgaatctgaccatgaatacccatagaatgaccaatgtatgctgctgatgataagcaaaaacctttttccatatataaatcaataattttatccatctttctttgatttattttgtaaataattattgatataattaaaaataagaagaaaaaaataacggagataatggttattagatctaatatgctcataaaaaatgctctataaatatatccgcgaaaaatcccatagtcttctcaaatccatagctacctatagccccaccagttaaaccgccgcccgccatgcaaattccaacagctaatccttcagttgcaaacccaagggcaacacatgctgctcctgctgctatactgccaccatatcctacggctatcccacctcctgttctaccagcaaatttactatattccttgatggttactttttcacattttcctgcttgcccataattacaggcatcaataacctgcccggtggtatcaacaaaatccagaccaatggcaacccggccaccatatttcatccatttaatcattttttcactttgtaaaattgtttgactatatccctttattgcgccaatccctgctttatcccattggtgagcaatggctttggttgataactttagcgcatgttttaaattaggatgttgatcgattttcaaagagagtcggccaactttatttaataatccctttaggttacccataatcagttgtctttctacataaaactcgggactggcaaattttcggtttagcccatttaaccgatattctctttgataaagcttctgtaactttgacagattttttttgatttgggagaaataagtatcacccagtgacgatgcggtgccaactaaggttcctccctgatccagtacatagtgaaacagaccaaaatgacgatgcaaaaatgctgcggattcattaggcagagctgaaacggattggttgacctgatactgagattgtcttaatagctgtatcatgtggggcggattataagagtctggatctgccaccagcagaatttgccccggtttcaggaatcggtaatttgaatttaatgccataaaatagcgagccgcttcgctatttgaatggctgaataacagactggcttgaaaacttaatcctccaggttgctgtacgacacagaaaccgggttgaatgtttcttttcataaatactctatttgttcctgtggtagcttttaacatgttggcctgacgttagatgacataacttaatcagataatcggattattttcaacatataataaatgggtttctaatctttacagagtgagaatttatagggagtaggtgatgtataaattcaatctgatgttgtcggttgatattgattaatttgcagttttttctttgctaaaggatagtaatagtgaacgtaatttgtttatatatttggtctgactacgagccttcaatatttacatttatataagatagttaacaatttgttacaattatcttatggaaattacaattattttattgaaatcaaaggaaaataactcagaatgagaacttgaacataaggtaaattaagtaggtatagttatggcaaatatgatttatgtgacgataaaaggtgaatctcaggggcttatttctcaaggatgttcgactttggattccattggtaatcggtatcagcatggacatgaaaatcaaattatggtgttgcaattcaatcatggtctgacagttgctcagaatgttaattatcagccggtaaacttcattaaactattagataaatcttccccattgttaatgatagcggcagctaatcatgaaagactggagttgacatttgatatttatcggacttctcaaataggttcacaggaacttttttattccatcttgctcaccggggcaaaaatttgtgatttaaatgttaattgtccgcatgttattaatgataataacggccagccggaggaagttatttcagttcagtatgttaatattacttgtcggcatcatatggcgggaacatcaggatattgcatttgggatgagatggtttattgataaatacagtttatacccgttatctttcaagttgcctctttgttggccgcactcactcaccccggtcacatagttatctatgctcccggggattcgctcccttgccgccgcgatgcatcttgaaatcaatagggtatatacgcttagttttcatttaatagctaagcgtgtttttaaaagtaagtatattgctattgatataatgatgctattaatattaatatcccattgaataaataacgtttcgtaattatgctacacatagccttcttcaacccattgttatacatagaattatgagtggtataagatgtagcactattttgaaatcttatttattcaacaataagtttaataagccattttcctcctttactatccatataaccacccgccatgcaaatttcagcagctaatctttcagttgttgcgccaagagtaacatatgttggctcaacgttggacaacataacttccttatcgtttcgtcaccatcattgcttaatcaaatgataagattatttttagcttataaatgtacacgtttttaattctacagtgctatgttttcttagaaatcctaaagggtatcggcgaatgattctgatctaaatctcaaagctggaacctatcgttagtacttttccatattctctgtaaaatcgctccaacgattttcctgcctgagtggtacttcttaagcagggggtaaataaggtttgaattggatttaaggaacgaaatatatcaattttgttacgttacaccttaaagcgtttgtgataaattcaatccgtttttgtctattaatgttggtcgatttattttttctactatagagagttaggatatgaatggatttgtatatttagcaatggcaattgttgctgaggttatcgcaacggcttcattaaaagcctctgatgggtttagtaaattattcccttctatactggtcattgttggatacggtatcgctttctgggggttatctcaggtggtcaaagttgtgccattaggaattgcttacgccatatggtctggcttgggtattgtgttggtttctattgccgcgatatttttatatcaacagaagctggattgggcggctattttaggtatggctcttattgttgccggtgtaatggtaataaacctgctttctaacagcagtgcacattaattaacaattaacggtgctcctgttttccctgaatcgttttctggagaagagatatgttaaatgccagtaataagaaaggattccagacagtgttattaggagtcctctttagtattgctgtattagcgggttgtagtcgccagacagggaaaacagcgactcaatatcaggggatacaatactctcaaccggaaaattctcaaccggcagttgctcttagggataatgccagagcaatctgttcttatgtaggtggcatgcctgcattagcaatacaattaaatggtgcgcaaatacctgtttgccagttggcaaatggtaagcgttgtgatgaaagggcattgttgcaaggttcttgtgcgtcaagttgaaaggtgaggtagaaatcaagcaactgatatgagcagaaacatgccgttggaaaggcagccttgggcatgattctgtgagtatacctgtcatctttcaagttgcttctttgttggctgcactcactcaccccggtcacatagttatctatgctcccggggattcgctcccttgccgtcgcgatgcatcttgaaatccattgggtatatatttgattcatcagacaatcattttcaactatctaagttggaaattatttacggctaaaaaattggctgattaatactaatgcagcaaccactaggtaagcagcaaaaataccgactagccattgtggcatctctaatgtcaggaattgccactgtcttactgaacaatcacctgtagcttcgaatacagaaggaagccattggtttaacgccaaccatgaagggaagtttacgaagaaatcacaggtattaaatggagaagggtgcaactgcatcatagtatgttgccatgcgagttgcaggccaccccaggcactgtagatccacaaaataatagccagccagcgtaacggcgtttttggtgcgattacacctaatatcccagcgctcaacacaccaaacagagcaacccgctcataaatacacatcacacagggttgtaatttcatcacatgttgaaaatataatgccgagctttctagtatcagggcagtcaaaatcattaacagccatgcgcttcgtccttgagaacagtggttcaaaaatcgcatcatttccgtttttccatgcagattaagataaacaattgagcgcctattttgccgatttacaggtaacaaaaaaagtcaattaaggtaaatttggctttttcggggaaaaataatgccgtattgagcgttatcattgctcaatacggcattggctggttaatgctataaaatgaattattgctggttatggcaaagcaattaggccccaatgaaccatcatgtcagtgactggaattagcagaaattctacacacagcaaaccgaccagcgtcatgacaatggtataaggtagtgccattatcaccatgcggccataagataaacgaatcaatggcgataatgtcgacgtcaacaggaatagaaatgcagcttgtccgttaggtgtggcaacggaaggcaggtttgtgccggtattaatcgcaacagccagatattcaaattgtttatgtgaaatcaggccctcttgcatcgcagttcttgcttcattgatataaaccgtaccgacaaatacgttatctgatactgatgagagtaagccattgaacagatagaacagggaaagttgagaagtttcagaaacctgtaatacgaactgaataaatggcgtaaacagttgctggtcaacaatgacggcaacgatagaaaagaatacagtcagtaatgccgtgaacggtagtgcctcttcaaatgccttacccagtgcatgttcttcggtaataccacagaacgacgtggttagaataatgacggaaaggccaatcagaccaacttctgccagatgaaacgccagcgcgacaatgagccatataccgattagcgcttgagcaataagctgtgctttttctttatgtgttcgttttgcgctggtttttttatcgtaatcttccaatacctgtcggacgcgttctggcaattctgtaccataaccgaacagtttaaagtgttcgaccagaaaacagactagtagcccgcagataaagacaggtagggtaattggagccatgcgaataaagaaggtgacaaaatcccaattaacgtttttggcgataatcagattttggggttctcctaccatcgtcatcacaccaccaagtgcagtgcctacccctgcatgcatcattagactgcgcaaaaaagcgcgaaactgttcaagagtttgtttcttttttgctgtatcaatgtgattgtcatgtttagcgttaatgacatcattctgatcagtaatgaagttgttgtagatagaatagaagccaagggaaacactaataactaccgcgataactgtcagagcatcaagaaatgctgacaggaatgcgctggctaggcagaatgctaaggcaagcatacgtttagattttatggagagcaggagtttagtgaaagcaaataatagtaattgcttcataaagtaaattcctgcgaccataaatatcagtaacagtacaacttccaagttattagcaatttcatgaccgacttgttgcggggaggtcatgccgatgatgaccgcttcaattgccaacaggccacccggttgtaacgggtaacatttaagtgccattgctaacgtaaagataaattcgataacaagcagccagcctgtgacaaatggattaataaaaaagaatatcaatgggttgatgatgagaaagatgatgatagcgagcttataccaatctggcgagttgccgagaaagttttttaccgctgtttttaggatactggtttccattgcaattaaagttcctctaaattcgtaaaatcgtgttctttaaacaatagtacgcttttatacagaatgttttaagggaaatgaggcataactaagcatgagtacgctttttttcatgaccgcctttacgctttctagactacatagctatattgaagttgcgtattctgatataatttcatctattattagttggaaaaatcacgttggaataataaaaatatggtcattaaggctcaaagtcccgcaggttttgcggaagagtatattattgagagtatatggaacggccgttttcctccaggctctattcttccggcagaacgtgaattatctgagttaattggtgtgacaaggaccaccctgcgtgaagtattgcagcgtttggcacgtgatggatggttaacaattcagcatggcaaaccaacaaaagtgaataacttttgggaaacatcgggtcttaatattttagagactctggcccgtcttgatcacgatcgcgttcctgagttgattgataatctactggcggtgagaacgaatattgcagcgatatttattcgcacggcttttaagcataatccgggtaactcattggaagtactggcagaaaaggagcatgtggaagataattcagagtcatttagtatgctagattatgatattttccgtggtttagcttttgcttcaggtaatccaatttacggccttattatcaatgggttgaaagggctatatacccgtatagggcgttattacttctctaatcctgaggcgcgtaaattggcgctgaatttttatcagcaattggtgatattatgtcgtgatcaatcttacgataacgtcatggaatgtgtacgtaactatggtaaagagagtggtgtcatttggcacagtatgcaaagtacgatgccaagtgatttgtctgaagtgtatcgctgatatctcgttagtatttttacttaattccaggcgttatccgatctattagtttcaaatcaacattattttaaattgacccggtgcagaatgttctgtaccgggcattttgtttcttttttttcattccatctccagccaatcgttaatgtctctatttcagagtattattctgattttttggtttttgtttgggtttttatttcgattaattgatggttattggtatcttgtggttgtttaattgattcatttttttcaccgaaaaacgctgaataatgacttgatatgaaataattagcctgcggctcatatcgtaattattatcttaattttatgattttaatattaattttcataacttggttatgtataaatcataaataagtctgttgcataaatgtaatctaattgtgatctaaatcataaatatagattattgacgtgaccgatgattgttctatattggttttttataaacagcatattatgcttgcctaaaattttaaattgtccgggggccatgatgaaaatccttattttaggtagtggtgttattggtgtaaccagtgcctggtatttggtacagcaaggtcatgaagtcactgtcattgatcgccagggaagtgctgctgaggaaaccagtgcggcgaatgccgggcagatctcaccgggatacgcaaccccgtggggagcgccgggtattccattgaaagcgattaagtggatgtttcaacgtcatgctccattggctattcgtccggatggatcgctgtttcagttacgctggatgtggcagatgttgcgtaattgtgatgcaagtcactatgcgataaataagagccggatggtacgattggcagagtacagtcgtgactgtatcaaacagttgagggctgatacgggtattcaatacgaagggcgtcagagaggcacgcttcagttattccgcaccaataagcagtttgataatgcggtgaatgacatcgccgttcttgaacaggaaggtgttccttacaatttattaacggcagataaactcgcgacagtagagccggcattggcgcatgccgctcacaaactgacggggggcttacaattaccgaacgacgaaacgggtgattgccagctttttaccaaagagttggtaaaaatggcagaagcggcaggtgtaacgtttttgtttaataaacaggtcaaacagttattggtggaagggcatcggattatcggcgtccagtgcgaagatggtgttatgacagcagacaactatgttgttgcaatgggagcttattccactgaattactgaaaggtcttgtcaaaattccggtatatccactgaaaggttattcattaactatgcctattgtcgatgcggaacgggctccggtatctactgcattggatgaaacatacaaaattgcgattacccggtttgataaccgtattcgtgtgggtggaatggcagaagttgtcggtttcaatttgaatctgcttaaagcacgtcatgaaacattgaaaatggtggtgcaagacctttatccaggtggtggcgatattactcagactcatttttggacaggattacgtccaatgacgccagatggtacgccaattgttggtccgactgaatatcacaatctctacctaaatacagggcatggtacattgggatggacaatggcatgcggttccagtcaattactggcggatattatttcgggtaaaaagcctgctattgcatctgatgatttatccgtatttcgttatgttaatggttttaatacaaaattggtgccatttagccatcaattacacactgaactgagaggctaatagaatatgccacgtccgatttcggcaacgatccatcttgatgcattggaaaataatttggcgattattcgtaataaggtcggtaatagtaaaatctgggctgttgttaaagcaaatgcttatgggcatggtctgcattgtatatggcggtctcttgatcaggctgatgggtttgctttacttgattttcatgaagcgattttattgcgggagcaggggtggcagggtgcaatcttactattggaagggtttttcaaacccgaagatttgccaataattgatgaatatcagttgacaacggtggtgcatagccattggcaacttgaagcaatagaagcggccaatttgagtaaacccatcaatatttatctcaaactcaacagcggtatgaatcgattgggatttcctgcggatcaatatagcgcggttttatcattagcaagagggatccggcaaattgggcaaataacgttaatgtcacattttgcgaatgcggataaggataataaggagatcagcgttactgaacaacttaacgttattcattcggtgagtcagggattggatatttctcaatgtttggcgaattcagccgcttccttgtggtatccacaaactcatagagattgggtacgtcccggtatcgtgctttatggtgcctcacccagtggaaagtggaaagatattgccgatattgggttgaaagcggtgatgagtctgcaaagtgagattattgctattcagaatctcaaggcaggagataaaataggttatggcagtgaatatacagcgccaggccctatgcgagtcggtaccgtcgcctgtggctatgctgatggttatccccgttgtgccatgacgggaacaccgattattgttgatggcgttaggacccaagtattaggtacggtatcaatggatatgttatcggtggatttaacgccttgtccgcaggcccaaattggcagccctgttgaattgtgggggcaaaatttaccggtggatgatgtggcggagagctctggaacaattggctatgaattattgtgcgcattggcaaatcgggtcccggtatctataccctatggattttgaggtgcatcgcgacggcaagggagcgaatcctcgggagcataggtaactatgtgaccggggtgagtgagtgcagtcaacaaagaggcaacttgaaagataacggggatagtgtcaaatagtcgttagcgtttggtattattgcaggaaataagttaccgttttcgctaaattaatatctctttgtttcctataatcagtctatttttgtcagaagaattaggtgggagctaaacatatcgtgctttttaaggcaaaatagaacgttattacttggaaatgagggaaatgatcttttacacttgatatagctaatcgcataattgttttaaaggaaatagttaatcatgatcaacaaagctaaaattttagccacagtcgccgctttttgtctttcttcatctttagcttatgcgggacagtggtcaattggtgcctctgttttggctgaggcatcaccttataagggggtaaagaataaagataaagtgttgtttgttccaatggttaattatgaaagtgacaatttctattttcatactttagccgccgggtattatttgtggaatcaaccaaaagatcagctatctttagatgtctattactatcctcaaaatttccgcccaaaagataatgaagataagcagatgaaaaagctggatcgtcgccatgatactatgatgggcggctttagctatcgtcatattgaagattggggaacgttgcgtagctcttttgctgcggatacgttgggtaaaagtaaaggcataacgattgacctggcttatttatatgaatttaaaagtgatgattggtcattacaaccaggattaggtgtggtttggaatagtaaaaaacaaaatcgttatgaatatggcattaaagatagtgaatcacgccatagcggactagaaaaatataccccagatgatagctgggctccttatttggaattatctgctaattataaatttaaccaagaatggtctgtatttatgatggggcgtgttgagcgtttaccgagtgaaattaaagatagtccaatggttaataagtcatattcaagtattgtttggacaggtgttacatatagtttttaattacccacggcgataatataccctatgcatcttgaaatccgtagggtataaaagagctgccgggggaaggcagctcttttcagacaaagtaatgactcagttatttggaaatatgagcaatcagatccagaactttgttagagtaaccggtttcgttgtcgtaccaggaaaccagttttacaaagttatcgttcagagcgatacctgcttttgcgtcaaatacagaagtcagcttttcaccattgaaatcgttagatacgacatcatcttcggtgtaacccaaaacgcctttcagttcaccttcagcagcatctttgattgcatcgcagatttgttgataagtggcgggtttttccagacgtacagtcaggtcaacaaccgatacgttaggcgtaggaacgcggaaagccatgccagtcagcttaccattgagttcagggataactttacccacagctttagctgcgccggtagatgatgggataatattctgagcagcgccacgaccaccacgccaatctttcgcagaagggccgtcaactgttttctgagttgccgttgttgcgtgaacagtggtcatcagaccttcaacaatgccgaatttatcattgataactttagccagcggtgccagacagttagtagtacaggaagcattggaaacgatctcctggcctgcataagctttgtggttgactcccataacaaacatcggcgtgtcatctttggacggaccggtcagaacaacttttttcgcaccagcggcaatgtgcttacgtgcagtttcgtcagtcaggaagatacctgttgcttctgcaacaacatcaacacctacttcgttccatttcaggttagctggatctctttctgctgtaacgcggatagctttgccgttaacaatcaggtggccgtcttttacttcaacagtgccgttgaagcgaccgtgagttgaatcgtatttcagcatgtaagccatgtatttggcgtcgagcaaatcgttgattgcaacgatttcgatgtctgaacgttcttgtgcagcacggaaaacaatacggccaatacgaccaaaaccgttgatacctactttgatagtcatagtgttccaccagctattttttagtgaattaaaaattattactaaagttaccaaaaccttgccagccgtcaagcggaatcgtgtcaatagccgaaaaacattagctttgagttcatcatttagacgcttgctatagggtactggcaatcgagccgcccatcattatcaaggcgcagacagatattgaaagttaattggttagatatgcgagtcacatcacaatatagtaggatatacccgttatctttcaagttgcctctttgttggctgcactcactcaccccggtcacattgttatctatgcgcccggggatttgctcccttaccgtcgcgatccctcttgaaatccattgggtatagacagattcagttaaccgcttaaaataaatttcactgatgcaatgttaattttttgttattattaatcaattttattgagcacatgagtcttactattaaggtggtcgttatggctaagcatcctgaggtttccctttataaagaacttactgatattcagcgtcatgtaacccaaaatgccgggacagagccgccattctcagggaaattgctacataataagaaaagtggcgtgtatcattgtttgtgctgcgagcaaccgttatttatgtccggcactaaatttgattctggttgcggctggccgagtttttaccagcctgccactcatgatgcagtgcagtatcttgatgatgatagtcacaatatgcatcgtattgaggtgcgttgcggtcattgtaacgctcatttggggcatgtgttccctgatgggccgcagccgacaggagagcgtttttgtatcaactcggctgcattaagctttactgatgaaaatacaggcgaaaaaacagtaggttaaccgtttttagtattgcggccataatcttagtttatgcgaaaaatcgtttcagctaattctgaaaaataatgaggaaatatcaatggaactggatgatctgttatctgtaatgacaccagaaatatatcaacgcttggttcaggcagtagaactgggtaaatggcaggatggtgtgcctctaacggtcgagcagaaagagaatagtttacaaatgattatgctatggcaatcaaggcataaccatgatccgcaacatatgacgattggtactgatggtcagttggtgatgaagagtaaacaagaactgaaagcgatctttcggtctaaaatggtggcaacattcaagccataatctttggcaaattaggtatgaaaaggctgagtgtgtaaaactcagcctcgccttggattgatatcagagaagagcatcttctagttgagcaagttctatcaatatagcgccttgctcttttagctcttttaaggctgattggctatcatttggactcaggttaacccctcgacagccatccgtaatgacccaggtttcataacctaatgccagcgcatccagcgcggtaaatttcacacaatagtcagtggcgataccaataataaacagacgttcaatttgctgggtttgcaaccagccatcaagccgggttttattctgatggccgttgtcaaagaaagcactgtaactatcgatctgtggattttcgcctttgtggaaaatttcaacaattgcctgcttgtttagctgtggatggaaatctgcgccatgctgacgttgaacgcagtgtaccggccaccagacttgtggaataccgtttaatagaccgatatcaccgatcttctggccggaatttacggcaaagctcatatgttcagcaggatgccagtcttggctggcaatagtgctgatattgtgtttcagacaaatagccattgcctgatttgccgcaacaatgacttgttcactctcttctacggctaaagcgccgccggtacagaagtcgttctgtagatcaataagtaatagggctgttttcatctctttccttgattatttatcaatataacttaattcaccacgtaaattttgttgcattaaataacgaattttttcattgctataaggttggctaagtaaatagtgcaacttggttaaagttgcttcaaaagtcatatcgtagccgcttatcacccccgcttcagccagagcatggcctgttgcatacccttccatatttactcggccagaaatgcattgagtcaaattaaccaccacgatccctctctctgtggcctgttttagctcttttaataattcagggtgttgaggtgcgtttccgacgccatatgagcgtaggataagcgccttaaccggttgcatcaaaatattattcacaatctgactggaaaggccggggtaaatggtgattacgccaatgggctgaggggtgatttgatgagtaataaattcactgtgattggcaggggcagaacatgcattgaaggttttgatgttaataccagcttccattaatggagaacagtttggtgaggcaaaagcatcgaagccgtcggcatgtgctttgacggtccggttcccccgaaacaatttattattgaaaaacagactgacctcgttaacagggtaattagcggcaagataaagcgcattcaacaagtttgtctgcccatcagagcgcagtgcttccagcgggatttgtgacccggtgacaatgactggcttacccagattctcgaacataaaggagagggcagaagccgtaaatgccatggtatccgtaccatgcaggatcacgaacccatcataatcatgataattttctcggatatcatcagcgataaattgccagtcttctggggtcatatcagaagaatcgatcaatggttgatgttcacggatagtgaatgtgggcatttccggtcgatggaattcgggcatctttgttaattggtgctgtaagtgcccggaaacggggatgtatccctgagatgagtgttgcatcccaatggttccgccagtatagacgacataaatagatttcttctgcatgactgtacctcataaaaagatcagctggattatatacccgttatctttcaagttgtctctttgttggctgcactcactcaccccagtcacatcgttcgctatgctcccggggattcgctcccttgccgtcgcgatccctcttgaaatccatagggtataggagtattacaaaataaaaaaagcctgacagggtttgtcaggctaaattaatcgagctattaactagaatcatgcactgtgataggttgcttagcgaatatctccgcaatttaaacagaatgcataacgattttgtggatcattcagatggcgatagaactcactctgttgtttcacttcctgagctacctgcaccaatggcgcgggtagccaggcttgaaccgcttccggcacgatagcttgtgcggttgttgtcaactggctcatcagcaactcactgaatgacatttctggttgcatccagtcaagctcagggttatccaattttgctaattcagccgctttggtgaccgcatcatcgaaatcccctaattggtcgaccaatccattggttttcgcatcatgaccaatccacacatgcccctgagcaatattatcgacttcttcgcgtgttttatggcgcgaagtagcaacaaggccaataaagttgttatagccgttctcaatattaagctgcatcagtgctgagaactctttgctgagccctttagtaacagaaatacccgcgagtggtgtggtagaaacgccatcagtgtggataccaatatgttccagactgttttcataagtggtgatgacaccgaagataccgatcgaacccgtcaacgtactttggtttgcgatgatgtaattagccggggtcgcgatccaatagccaccggatgccgccattccccccatagaaaccaccacaggtttattcgttgcacgtagcgcagccagttcggtgcgaataacatctgaagcgctcacgctgccgccagggctgtttactcgcagaataacagctttgatattatcatccaaacgagcttgacggatttgagcggcggttgtgtcaccgccaaccatgccttgggtctgctgcccatcgacgattgccccttgcgcgacaataacggcgatattgcctttagatgataacctgccttctaccaattgcggtgcataatcataaatgctgatagcattgaagtggcggtttttttcgtcccaaccaaaggcttttgtcatgtcactttcaatgacattgcgtggcgcaacgtaatcgaccagcttgtgtttaagcgcatattgcgcattatctccgccaacagcacgtaagctggcaatcatctcattagcgcctgggaatacctgatcaacagtgagtttgcggttggtagcgacagtattgaggtagttgtgccacaggccgttgatccaacggctatcagcttcgcgggcagcgggagacatatcatcacgcataaccggttcaacggccgatttatacgtgccgacgcggaaaatatgcgcggtgactttcagcgaatccagcagggatttgtaatacaggctattggttgaatagccataaagaccaaccgttccttgtggtgatagatagattttatcggcaaaagtcgccagataatattgtgactgattataactatcactgatagcataaaccggtttaccggaagttttatactcattaatcgccttaccgatatactgcatagatggctggtcggcaccgatgaaatcatcaagtttcagcaccagtcccgtgattttgttatcggtttttgcttggcgaatgctatcaacaatatcaaacagggagttttcctggaatttattgctggatgtaccaaacaactcacggcctaattgagtcaatggggtacggttggagacctgatccacaataacaccggtgagattgacatataatgctccttgataactatctgccgttttgtttgtctgttggtaaagtagaaaactgccaaccaccaccagaatcagcatgataaaaatcaggtttgaaatgacttcccgaataaaatttaatagtcgccaactccatttaaataatcttgcgatcaacttccataaaatacgcatatcatctccaaaaataggatcaagtgaagctatcctaatgatcagacatgtaaatgtcagcttcaaatagtggcatattgcctgaaaagacagctttagggcttttatttgttaacaaataaacagaaaatgttagcttataacaaaatacattacttaggagagaaaagatgaatgcattagaacttttgttgaacagacgttcagtatcacgtttaaccaccccggcacctcaaggtgaagcattacagcatattctggcggcgggaatgagagcacctgatcatggtgcattacgtccgtggcactttattgtcatgcaggatgacggtattgagcgattcagtcgattactccatcaagccgccattgatagtcagcttggcgctgaggcggaagaaaaagcgaaaagtgcgccttatcgtgcaccattaatcatcgctgttattgcaaaagtggtggagaattccaaaatacctgaatgggagcaggtggtttcagccagttgtgcggtgcatgcgatgcaaatggcggctgtggctcaagggtttggtggtatctggcgtacgggttcatggactgatgataataccgtgcgtaccggtttgggttgtcatgaacatgacaaaatagtgggttttctctaccttggaacgcctgcactaaaagcacccaataaggtgactgcgcctgatatgaccaattttgtcagctacttgtaaccggggtctgttatgtcaacagaagttcgtcttacccaatacagccacggtgctggatgcggttgtaaaatttcaccaaaagttttggaaaccattctgcatagtgagcaggaaaaatttcttgatcctcacttactggttggtaatgaaacccgtgatgatgctgcggtttatgatattggcaatggtaccggcattatcagtacgacagatttcttcatgccgattgtcgatgatccatttgattttgggcgcattgctgccacaaatgctatcagcgatatttatgcgatgggcggtaagcctattatggcgatagctatcttgggatggcctattgataaattagcgccggaaattgcccgtaaggtgattgaaggtggccgggctgcgtgtaaagaggctgggattgtactggcaggagggcactctattgatgcgcctgaacctatttttggtttggctgtaaccggtatcgttaatattgaccgagtgaaacagaacagtgccgcgaaagtaggaagccagctatttctgaccaagccgcttggaattggtgtattgaccaccgcggagaaaaaaggcttgctgttacctgaacatcagggaattgcgatagaaaccatgtgtcgcttaaataaattgggaatggattttgcggaagtggctggcattacagcaatgaccgatgtaaccgggtttggtcttttaggccatttaagtgaaatttgtgcaggatcgggggttcaggcaacactccattttgcaaaagtgcctaaattgccggaagtggaatcctatattgcaaagggttgtgttccggggggaaccgggcgtaactttgatagttacggtcatcttattggtgaaatgacagaacttcagcgcaaactgttatgtgatccgcaaacctccggtggcctgctgttggctgttctaccagaagctatggacgaagtgaaagcgattgcacgatgtcatggcatcgaactgaccgcgattggtgaattgtctgagcaacagtcaggcagagtactcattgaggttaatgaataatacccatgcggctttttattgcagaaaaaccaagtctagccagggcgattgccgatgttttaccaaaaccgcatcgccgtggtgatggctttatcgcttgtggcgataaccagtttgttacttggtgtattgggcacttgctggaacaggcggaacctgatgcctatgacaatcgctttgctcgttggtcattagttgatcttcccatcattcctgaaaaatggcagttaaaaccgcgaccttctgttgagaaacagctcaatattatccagacgttgttggaaaaagccgatgaaatagtgcatgccggtgacccagatcgggaagggcaactgttggtggatgaggtgctggattttttgaaactggatgcagtgaggcgaaaaaatgttcgccgctgtttgataagtgatctaaatccacaagcggtaaccagagcggttgatcggttaagagataatcgggattttattccgctatgtgtttcagctctcgccagagctagggctgattggctttatggcattaatatgacccgtgcttataccttgcttggccgtaatgcggggtatcagggggtactatctgtcgggcgggttcagacccctattttgggtttagttgttcgccgggatgaagagattgagcatttcgtacccaaagatttttttgaggtgaaagcgcatattgttacgccgaaagatgaacgttttatcgctatctggcaaccaagtgaatcttgtatcgattttttggatgaagaagggcgattgatacaccggcctctggctgaccatattgttaccagaataaccggtcaaccagcctatgtgatctcttatcaggataaacgggaatctgaagtcgctcctttgccattttcattatcttctttgcaaattgaagccgctaaacgttttggcttaaatgcgcagcaagtgttggatatttgtcagcgattgtatgaaacccataagttaattacttatccccgttctgattgccgttatttgcccgatgaacactttgccggtcgtcatgccgtgcttaatgcgatatctattcatgcaacaaagctgttgccacaagagttactggaaatagatagaaagaatcgttgttgggacgataaaaaggttgatgctcaccatgcaattatccctacagctcgaagtagccatataaatctgacggatagcgaggctaatatttatggtttgattgcccgacaatatttgatgcaatttttcccggatgccatattccgtaaatgtgttattgaattggaaattgcgggtggaaaatttattgctaaagcccgttttcttgctgaggcaggttggagaacgttacttggtaataaagagcgtgatgaagagaatgacggaacgccattacccgttgttgctaaaggtgatgaattattgtgtgaaagaggagaggtagtcgagcgccaaacccaaccgccaaagccatttactgatgcgactatcctttctgctatgaccggaattgcccgttttgtacaggataaagagctgaaaaaagtccttcgtgcaacagatgggttgggaacggaagccacgcgggctggcattatcgaactattgtttaaacgggagtttctttataaaaaagggcgtcatattcatgccacacctgcgggtagggcgttgatccatgtattgcctgatatggccgctttaccggatatgaccgcccattgggagtcgcggttaacgcaaatcagtgaaaaacagttccgctatcaagatttcatggggccacttgaggagacattgcagcaattaatttggcaggccaaacagaaccgtaatttaaccgcttttcgtgatttaccccccctcccagtgaaagataaaaaagggaagaaaataaaagcaccgaaaaataccaaaagagctgcgccatagcgcgcagcaattattacattattttaaaaacgattgatattcggtgttaacggaatatcaaatttcaaattctgcccaaactggggcatgatctgacggtttttccatctcacggattttatagtcaatacctgttgcgatacagcgatccatcaaaggcttacttgcaagcagtaaatcaatacgtagccctcgattatcatcaaaccctttggaacgataatcaaaccaggaaaattggtcgttacattcaggattgagatggcggaatgtatcaaccagaccccagtttttcaggcgatccatccaatctctctcttctggcagaaaagaacatttacctgtttttaaccagcgtttttggttgttctcaccaatgccgatatccagatcggtcggactaatattcatatcacccatgataatcacgtgtgattgaggggttaagttttgctccaggtagttttgcagatcctgataaaatttctcttttgccggaaatttcactggatgttcacggttttctccctgtgggaaatagccattaataacggtcaataatccgtgtggggtttccacttctgccatgataacccggcgttgagcctcttcatcatcccctggaaaaccacgatacaccgcaagaggcacctggcgcgttaacagtgcaacgccgtaatgggctttctggccgtaataaaatacatgatagccaagcttcccaacctcttctagaggaaacgcttcatcatgaacttttgtttcctgtagaccgataacatcgggttgatgttgctcgatgatcgcagctaactgatgggggcgggcacgtaatccattaatattaaaagagataaatttcatcttttacagccatccagtaaaaagacacaggaacaatagtaacagatggatcttaaaaagtaactattgacaatggtcagcacgaaatagtaacggatcccctaatattataatttgctgtgaaaaatataataaattgtggtgagaaagagcctcagttagaccgtttttatctcaagtgttacaaaaattgattactgaaaaatgtagaaccctatcctaatctttgatagaaaattgagctcgttagtaatgtttatattttctaatggttgattggttgagattaatttttgaaccatgataaacatgaataatagagtttattgagccacctatgtattgaacatacgctttttttatgtggtatatgtttgagaagtatttgtttttttgtacaaaatttatgccttcacagtatcaaacttgatttagctgtcatttggtgaaggctatttcaaagaaattattttagccacaagttatataggaacggtgaattatgtttttttctcgtaaattagaagcattcatggcagtggtggaaaatggttctttaagtaaagcggcaagagtgatgaaccgtacaactcccccagtagctaaatcaatcaaagacttcgaagcaacattagggaagcgccttttcaaaagggagaaatttgggatgagtctgactaaagatggtttagaattatataatgatcttaaagatctttatttacaagaaaaagaaataactaaaaaacatatcagtggtagtatatgtaacatagttaatatttattacgattgggggaaaaacaaacatcttatttatttatataaggcagctgatagaaatagctcacaggtaaatatattccggtttagttatgataacattgaagaaatagtggattatgacggcaacacgctcattctgagctcagaaaagatactaagtgaccgttttagtctcattcgcaaaataaaagggcctgaattgggaatttgctgccgaaaagagttattagatattgctaatggcgatgtgatgcaattgctaaagagtaatacttggctatgcgatcctgtactttataaaagtagcttcgttaaaaacttggaagaagaagttattcaaagtggtggaaaagtaaatatgcgtcagatggataatatgggatgctgcatgaatttcatttattccagagattatatatttattacagattctcatcctgatgaattggaaggaggagacgctttgagttttgttcccattgaaaaacctggcgcagcaaatcaatgttatatttataagtctaaatcacactcaagtgttcttaatcgttttatcgattcagttaatgacatgagttaaaattcatctacgcggagaggattattgtaagctccgcgttgttaatatgcggagataattataaagatttttcactgtacctaaatgataaatttatatttataattcttatttgaatattccaagtgaatgtttgatcgtggtgaggaaaaatggactgttcctcgccttttggagcaacttgtacgacaaacctgacattatattcactctcgtctggtgtttggcacagcccattgtgcatgcacaaatctgcatggccttggttttactgctttagccggggtgttgtggtactccaaaaaataatgttagcccccaagtcgttttcggcaaaattagtaaactcctcctgagtgaaggcttttttagtttttggattggtgtaggtcagtgtgggttcttggactgccattgccaccaaatccagtttgcctttgtaacgattgaaaaagggataagtgtttttcatttgagcagattgatatggcacgatatcgggaccgtcgagaccgatcttatttttcgacgcgaaattaaaaaagcgagacatatactgatgatcgttatcccattcacatggccagaaattaacgtattgtactacgtaggattgtagaattttttaaatacctggcgggcgaatttgatattatcaagttcggcggaaaaatagcggtcacggctaaaaccggtcttatcctgtttcatgtcaatatcaacggcggtttctggtagattaatcccggtaatacggccgtcaaactcttttaccagttcgaaaagcagatcctgatagcgtttgcgcaacgctgtattccattgaatagcaatccaaccataaccttgtgctttgccttcaccgggattatcaacttgagcaactaaaccgccttgatattttgtgccttgttagagataaaatggcataaacaacttgtacaccgtcaatattttgacgttctaacagaggacataattgatcgagctcatcggatgaagtgtagagatagttttgtggttttcctgcgagtgcatcagttgacaataaactaaaaatcagagtggctaagatgagttgttttagcaccatgattatttccctccttaattgtaagggaacgagtaaccggcttatggcagtttaacaaaacagatagttccatgactttacgaatttatttaacaccacaaagttactttattgattaattggtaattattttccgcatcttagtactcatttatccctatctttgtaaataagttctcattaaaaacaaataagaatattattaattaatataattttattaggattgttgactgttttttggaattatttagttgtttattgttgaagttcaataaaaattaaacgaacggcattttgtgataataaagtcttgactttgttatcagataattaaggggattgtcccatctataaataatttatcttgctgtagaagataaggaataaatggtgggcatatcagcgtaaaatataatttataccctatggatttcaagatgcatcgcgacggcaaaggaatgaatccctgagagcttgttattcgcataacatgaatgagaattattcctttttacagcgattttatgaatgatatttaaaaaggaataatgagatttaaattaatgcaacgtgttgaataataatgaaaatagtatatttctctcatggggtgattatctaattataaccagatattcaactccatttcattttatggcaaccaatgcaagcttatttttgtcagtaaatgtcatgttattgttatggggattaaatatcctgcccgatacgttgttatatcgatggcgatagagtctgggcattaaaaatcgtatttttttgaaaaaaagagttgatctttatatacacccattaagaggataggggaattaggcaatcgcttattttgttcatgtgttggtgtgttgcgaaaagatgaggagtcaatgatgaatgaagcgaaggaaaatgagatttaccttcatcctgaatatgatgaatgtggtcgtccgtactacaacgtatcattttcctgccggggtaatggagagcaatctaaaatcgaaacgcgatgatgagccagtctggttggtaaattctgagattggcgttgcaagttggataatgaagaatgcttcttataggaaagagacgttagatcctagtaaatttgattgtgctttgataagcaattatgcagaataatgtaaggtagtgcggaaggcgatatgtatactgtattcctatatacttatcccacagacagatcaaagggggtcacatgacagtaggaatgacaacgttagtaacgttgctaactccacttccagacgttaatcagttagcaaaattgccagagtatctttctgctccgattacgcaattggtgcaagacagagcagggcaaaaaatgctgactgctcaagaggtgatgtcatatttctctgaatctaaaatggcgcttgcctacctgaaagaaaatacccaaattggtattgaattacttgaaaccattgaccgtgacgggatcgaaccaggtatagatattcgtgatgtagtcgagcgttacgaatccgctgcaaaaatcgccacgagtcaactccatctcttgaaattaagttatattcttgcggagtcttcgcctgcatggggaccgcatgtcaagctattccaaacgcattctcagagagcgttgaggatttttgcaaataatagaaacgttttattgcgtattgcaacaatgttaaagcagtacttgccagttaatgcaggtgaatatacaccgaaagccgacgcggaaagttacaaagagttggtgaatctctcgcataaaaagctcggtattccattgcctgtgtggggttaggtatatggtttacgtcagcgtggcggaagagctacttttcaatgcggctgctcatgattacgcaaccatgttggttaaatatttgagtggtgcagaagaggtgtctggttggctgggtgccaagggcgttttgagcgcaacatgcaggctatggaatcaggaatatggaagttacatattcttcccctgaatgaaaaaccgtggccgacaaatgtgatgctacacaacaggaaaagtgacaattatctggtttatgctcaacattggtattatgaaaatcattatcaggtcatggccgtggtgatgccagatgcacattcgcgtattgataggctcttggataagctagggtgtgtcccgcaataggctgagatagaataatctatgtggctctgactttcggaaaaaacatgttatggctcgttacgaccttcctgatgaagcatgggagttactgctccccttattgccccctgaacattctcaacgggcgggacatccttatgttgaacaccgccgggttatcaacggcatgttttggatactctgttccggtgccccctggcgggatttacccgaacgttatggttcctggaaaaccgtctataatcgctttaatcggtgggcaaaatcggggctcattaacctcattttcaataagttattgtcaatactggatgaacaaggtttagttgattggtcagctatatctctggatggcagtaacattcgtgcggcacattgtgcggcgggcgccaaaaaaaacatcccgatgtcaccgaaaatcatggcctgggtcgctctcagggtggttatggctccaaaatccatctggcggtcgatggaaaaggctatccactgaatgtggtactcagtgcaggtcaatgtcatgaaagtcaatatgcagtgcgcctgctggatggtctgggtattcagcgtaaaaacggttttatgaaacgtcgttcaaaagcggtgattgctgataaaggttatgccagccacgcattacgtaaccggttaaaaagtcagggaataaaagtgataattccctataaatcaaatgaaaaagcgcggtcagatggacgggttaaattcgaccatgaaacgtatcgaagaagaaatgttgtagaaagatgttttggtcgactcaaagagcatcgtcgcatcgccacccgttatgaaaagacagcaagaaattatatcgctatggtgaaattaggttgtatccgcttatttcttaaggccataatttaattgagggacataacctagttcatatcgtagaagattctttccagtgtctaaatgagcgggaattaaggctgcttaatcatgtaagcgcatgaacccatttactaagaaaagcatatagacctgctccggcaggtttttttatggagttttcacaatgccaatctattggagataagtcaggaaatatcgtaatcactaactactcttattaatagtttaggcttagcactcgcggtgctttaccgtctatgcagtagtaaacttaaaaatattctattgaagtaagaatctaatttgaataatatcttatggctatttggcagtaagatgaaattacctttattaataaataattaagtgaggtgtttatgtctgaaattaataagccagaagttactgaaatagaaaataaactccctgagcataaatcattaaaccctgatcaatacaaatgtaatcatgttgttgccccagaaaattcttgtccgtgggcgattattcaagtgtatctaggaaatcaagcacgtcgtggtgattgggattctcctaatgaatgcatacgccttattcctgaatcgaacgctaacagtgaaggcaataatctgatttatattgagaagtgcgataagcatgggcattggttaccttggcaaccaacgccggaagatataatgggtagtgattggtcattgttagagccagataacaatatgatggtttttgatgttaccttagggactagtaagtatgatacagggcaggactggggatatatgagtgacaagggagtctttggtaagggagaatctactttcggtactttaaatataacccaaaataaaatagatattaaaagcattttaaggttctactataatagcagcggattgtatttgagagtatattttgataaagctaattatcagaaagttaaagaagtactcaagaagaatttttatgtctcagttgataatgtaacttatgattttggaactttcttgcatgatcatgatgcagataacgataattatgaatacgatgtctactattatgaatcggaaaacccaaccgtagaaaaactaggtgccatattaaagcagacaggtgaaaccaagcgtttttactgtaactggcgttaactatattacattgaattccaggctgcgcattgcgtggccttttttcgttttaaaggccacctatgtaaatattttcagcgaggcaagagagcggaaatattctgcttaactgagatcagtttatgcataagaatagaggataatcttaatgaagtacttaataagcatttaaggttattaggcactcgcaacgatgatgattctaaagttgtccgacctgatggttcgtcaggacgagttgatttgatgttaagtaaatcaaaaggctggctatctcatcattcacagagaaaactttttgagcatggaaaatagctggaagtactaactccaggtcaaggatggcaaatttaaaatagacccacatgatatataatgctgtatgtgcgccattgacttatcccgccaaagcgtatactatcacctaaatgtacaccagtgacgcactaagacatgatatttattgagacccatatcttcactgaagattgtaaagagttgttaagtgacgatgaatatcgtgaatttcagcaatatctcgcagacaatcctattgctggtgatgttatccaacacactggtggcttacgtaaagtcagatgggcatctgggagtaaaggtaagcggggtggtgtgcgcattatttattactataaagtagatgtctcacacatcagattgttactgatttacaaaaaaggcatcaaggatgaccttagtgaatcagaaaagaaagtcttgagagcactaaatgaggggtggtaacaatggatagtaaattattttctagactaactgaaagcatgacacagatgaacgaaattattaatggcgaacgtgctgcctctcgtgaaactcacgttgaagcagtaaaagtaaagaatattcgccaggcaaccggtttaactcagaccggttttgctaagttgatttccgttaatgttggaactctgcgcaactgggaacagggaaggcgtgagccaaccggaccagcaaaagccctgttgaaggcaatagagaaagatccggttcatgttttaaaggcgttatctatgtaaatagagcgcataggaattcctcagcctcgtttcagcgaggttttttatgggggaaatagggcagaagaatttaaatggagaactcagatacagaatacctaccgctttgacaattaatgcaacatttgagcaggcatttcagcatgaatatcacatcagacgtacaaaaattagaaccgggtgaaaaactgggttacaccgataaaaaagaatgtcatgaatcatgatcttttcttattaaagcggcccataacttgctgaaatgagccgtaaagaagtggatgaaacccgcttgtatgctgtttaatttaatggaccatccattgatggggatttaatcattttttaaataaaaatcatcattatctcttagccagaaaaggagctgtatataggatagttgatatccaaatgattgcggtgataaacataacaatcatcctggtgaaacgccagtaaaatggctttggcggtgtagcgatgggaataggtaattgagtattttggagctgacgattatcttgttcgtcatcttgaagtggcaggataaaacgataaccttgtcggtacaccgtgtgtatggcttcacctagatcacaataacgtaatgttcggcgtaacttgcagattaattgcagtaaattggtttctgctaccccatctttgcgttcaggccaaactagagggatcagttgctcccggtttaacgtattcccttgggatgcatgttcccacagtgcaagtagcaggcgtttctctttctctgtaatgataaatatatttttaccatgaattattttgtttgagtcacagtctaaataaacatctctagttattttcaacataacgcattctctgcctctgtttagtgtttgtctattttttatatagccaggagggctcaataggcacttatacctgttagagtttatatattttatgaatgagtaatgcaagaaaataaattatttaaaattttttattttattttgtcatatgggttatttttctgttttttattaagaagtaaaactaatgataattaattattagttttataccctatggatttcaagatgcatcgcgacggcaagggagcgaatccccgggagcatagaaaactatgtgaccggngtgagtgagtgcagccaacanagaggcaacttgaaagatgacgggtatatattatgttgaattccagcctcttacttgcggagtttttatatataaagtc

SEQ ID NO: 37 - DNA, 530312 bp, Photorhabdus luminescens
  misc_feature (504045)..(504045): n is a, c, g, or t
gtttatatatcttagaaaaaagctcaatattttcatagagagataattcctcccaaagcattgatttatttccaaaaacgataccaagattagataaaagattaaaaggtcttccatttgaatcaataccaaaaacagtaatatttccagagtttggagttaaaataccggaaatcagctttattaaagttgtttttccggcaccattcttccccagtaatcctataatattgttatcgtcaaatatttcaatatttatattttcaaataaaaccacttcgatttcatttaatgaaaatatatttttaaaaatattttttttaatttctctacttttataactaaagcataaatcagtaatttttatcatttcaattcactatttttgtaagtaatatgtcattgtcatgcatgatatattcttttactttactgtttctaccataaacaataaatttttctttatctatattcattattcctttcgcataatcttgatcccaaaataacttacctaatacttcaccagtttctaaatgccaacttaaaatatagcgactgtaacttatccctataataatgctgtcgttgtaagtaataaaatcctcaatggtatttaaaccacctttataaaattcagatatatgctcccatgacttattttttgcatcatatgtaattaagtctatattactggaattaactactgctaatttatttttatcaatccatttcattcttttagggattttactgtctgtatatgctactgcatgatattcatttaaactatcaagtatttttacacttccaactctctctccaatggctaacatacataaatcaaaattaaatgatatagaccatactggctcagacttacttttatatataaccctaacattatctccttctattttgcatacacatcctgattccgaagcaatatatatactattaaaaccaaaacataaatcacggacaggagatttaatattaattattttaaaatcatcatcatgatttttaatcatgatcttaccattagttccacctagcactaataagttttcatttgaaatggctcgttttatataatatccctcgtattctttttttatcctataatcaaaaggctctttttggttattcgatgaaaataaataaccaccatcctctccaaaaaatagatccttatctaaataatttacatatgtccaaaaagccggtggagtctcttttcttaatttctcaaccttttttgttgataaattgaatttaactatacttccatctctgatctgtaatatcaaatatggaatattatctttatatattatatctgaccaccttattttgaatctagcctcgtaaattacttcaattttctctagacttttaacatcaattttatatacttttctatcaaaagatgttccataagcaactttatttatataatcatatgttatatgttcaaaatcatcattagcaaactttggcccaattttataatttaaattatgctcatctaatcgtacaacacatctagcatctgttgctacaatgtattcggaatcattaactttttcaaaccagtgtacagattcgttgatattatctaatttaatagttcttgtggaattatctttaatatctattttcccaaccatcccattaccaaaaccaaccagaatattatcatcctctgtccaacataacgtaacaatatcatataatacgtcaaatctgaaatttgatattatatttttcatgtctgataaatcagctatcatgcatgttgaattaggagatctgaaggcaacctttgtactatcagaattaagggatatcccttggctttcacctctagaaacctcatgtccatcttcgactatgttattcagaccactaaatacaccatttatttttatcttttcagataaaatttcacctataattacatcataattttgtgataaagccgcaaaaactccattctttatgtctattgccataatggttccattagatattttttttcatccaaataatctaaatcgctaaaatcaaaaagtactatttctccagtttttgttcctgcgagtattttatcacaaaatacctttgttgcattataatgtttcattttttcatatccatattatttttattcttttaatgtgaaggctataacagccttcacatctctagatattacttatcgctgtgcgattttaaaggacgaggaacattattacgtacttgcttttgcattttcatattttatctccaatttagataagtttatttgtaaggcacaggataacataatgttaattacccgttgaataatttatagtaaaactaacatttgttgtcaaattataaaacacgtttgttaacaagaattttgaatcacgtcacagagaggaatcattattagatgctatacttactcttttatgtaaaaggctaaaaccaccggcttcgagataaagatagtttgtctttcaaaatcgaattactatgtagatatttataatcaaaaagtcataacgttaagttttgagccattatcagtatatcaatttcgacatatattaccgataggccagatagaatcgttttctctgtttgatgtagatacttatgtgtcgtttggagaaaaaacaataaatactcttcttacagaaaccagtaattgattatttttacgcaagatacgacaacgggcgcgtttgttttttcgtcctctggatgcttttttatttgtccaccgaagctggcaaagccgtcaggctgaagggtgaggcggcaacgcctcaccctactcgatacactatatttttatactacagttgcgtggcagacttcatttttgatacaaattcagtcagttctttcagcattatttctggctgagaaagattttcttcgataattttaacgatggcagaacctgaaatggctcctgctgcgccactcgctaatgtttcttttacctgcttaggttctgaaataccaaatccctgtaacggtggtgcagcatgatattctcgtagtttattgactagatgatttaatggtttttcacctcgtctttctataccggttactcctgctcttgataataagtaggtatatccgcggccataagaagcaatttcacgtaatagttcatcttccgcgtcggggggacaaataaaaatgggggcaatcccatgtttcatggctgcggtacggaatggccgtgattctgacataggaacatctgcaactaataccgaatcgatatctgtatctttgcaacggcggtagaactcatctattccatgatgaaaaaccaggttggcatacattaataaaccaataggaatatcaggatattttgcccgaatttttgttaatagttcaaaacagagcgtgggagttacatttgaggagaaagcgcgtagattagcattctgaattgtcgggccgtcagccagcggatcggaaaaaggaatacttaactcaagagcatcagcaccaccggtaatcagtgcatcaataattttcaatgataattctggggttggatcaccgagtgtgacaaaggggacaaaagcaccttgtttacgactttccagttgcttaaatagctgctcgtaacgttccattagatttcccccctagattttaaaatatcgtggacagtaaatatgtctttatcaccgcgaccagataggttaacgatcagtaattgctctttatcaggagcttgatggatcattttcaaagcataagccagcgcatgagaggattcgagggctggaataataccttcctcacgggaaagggttttgaatgcttctaatgcttcatcatcggtgatggaaacatagtcagcccgtccaatgctgttcagataggcatgttgagggccaacggaagggaaatccagaccggcggaaatagaataagattcttcaatctggccttcatctgtctgcatcatcggcgatttcataccaaaatagatacccaatttaccatgtttcaatggagcgccatgtttaccggtttcgataccgagcccggcaggttcaataccaatcaggcggaccgatgtttcaggaataaattcggcaaacatgccaatggcattggagcccccgccaacacaggccaacacggcatcgggcaggcgtccctctcttgccagaatctgggatttggcttcttcgccgatcatacgctggaactctcggaccatcgttggataagggtgtggtccggcggcagtccctaataaatagtgggctttatcatagctaccagaccaatcacgtaacgcttcattgcaggcatcttttaaggtggcagaaccgctgtgaaccggaataacttcggctcccatcaggcgcatgcggaaaacattaggggattggcgctccacatctttagcacccatataaatgcggcatttcatatttaaaagtgcgcaggtaagggcggtggctacaccatgttgaccggcaccggtttctgcaataatttcgtttttgcccatgcgtttcgctaatagagcctgaccaagtacctgattggttttatgagcaccgccgtgtaatagatcttctcgtttcagataaaggcgcgttttggtgccttttgtcagattacggcataacgttaatgccgttggcctgcctgcataatttttcagtaaatcttgaaattcttgctggaattcgggatcttgctgagcggcaataaatgcggcttctaattgttcaagggcgggaataaggatctgcggtacaaattgcccaccgaaatcaccaaaataggggttaagcttactcattattctatttttccattgtaattaattgaaatatagtaattaatcagaaaacagtaattaatcgaaaaattgctgtttattggtaacagcgtaacagttgaaacaccttatttagtttatgactgcttttaatgccaggtgcgttttcgacgccagagttaaaatcaagtccgcaacagccatattttgcggcttgttggcaattttcttcatttaatccaccggcgagcatgatgttggcgagtgattgtttttcaagtaattgccaatcgaaactttggccggttccacctttgccgttatcaagtaaataacggtcaacatttccggctttggtgtgaaattcatctttcgacatatcaattgctttccagatttgacaattttcaggcaatatttttcgcaattcctcaatataaacttcgccttcggcaccatgtaattgcaccgcagccagagaaaggatacgggcggtatgactgatgaatgcagatgattgattttgaaataccccgacatatttgagatttgctgcattgataatttgttgggcctgttggatattaattttacgcggtgaatgttcagcaaatatcaaaccaccataaacagcacctgcctgtaatgccactttcgcatcttgtggccgagttaatccacagactttattttcacccagaatcagttgacgtaatgctaaatccagattgggttgagccatcaaagcactgccaatgagaaagccattagcataatggctaagctcacgaatttgttgatgctggtggatacccgattcgctaataacaatagtttcttccggtaactgtggcgcaagttgtttggtacggtttaaatcgatagaaagatctctcagatcacggttattgatacctattactttagcttttagtgcaaccgctctggctcgctcttcttctgagctgatttcagtcaggacgcccatattcaggctatgcgcaagttcagacagcgtaatatattgctgatcatcaagaacagaaagcatcagcaaaatcgcatcggcttgataatagcgggcaagataaacctgataaggatcgataataaaatctttgcacaataccggctggtgaacggcatcactgactaaacgaagaaattcatagttgccttgaaaatatttttcatcggttaatacagagatggcggttgcatagggctgataaattttcgctatttgaattggatcaaaatcttggcgaataacgcctttagaaggagatgcctttttacattccagaataaaaacggtctgttcactgtttagtgcctgataaaaatgacggttgctggcaacaacagcattaataaaactttccaatggttgttgctgtttacgatgaataagatattcggctttatcattaacaattttctgtaaaatggtagcttgcatgattaactccttgttgcaagtgctataactcgttcataagctcggccactgtgaatggtttcgagagcttgttgggtgttatgacgtaaatcttcctgtccatgaattttcattaacagagcaacgttagccgcaacggcatcagcatgggctttcttaccccgtccttgtaacaataaactgagcatttcatgattatccacgggtgaacctccttttaatgctgacattggatgacgttgtaaaccaaaatcttcagcatttaattgataatggataatttctccatcgttaatttctgccactttcgttggtgcatgcagggcgacttcatccatgcctccgctgtgtacaaccgctgcccgttgatagccaagaaccagtaaggtgcgggcaatcggttcaacgagctccgggctgtagacgccaattaatgctaatggcggacgtgccgggttaatcaaaggacctaatatattaaatatagtccgggttttcagttgttgacgtaccggcatcgcatgacagaatcccagatgataatgtggcgcaaacaggaaacagatgccgatttcatccagtgcactacgggcacattccgcgctgatgtcaagggcgataccaaacgctgccagcaaatcagaagaacctgattggctggaaacgctgcggttaccatgtttggcaattttaatctggcaagccgaggcgacaaaggcactggcggttgaaatattgatactgttcgcaccatcaccgcccgttccaacgatatcgcagaaagtgtaatctggccgtgggaatggcagtgcatttgccaataatgcttgggctgcaccggcaatctcctgtggttgttcacctcgtaatttcatgctgataagtacagcagcgagttgtggttcacttaattctccttgaataatggcggcaaatagttgctggctttcttgttgtgtcagtgtttgcgcattaaacaatttgttgaaaatagcttgcattttcatctcccttttaatttagtgcccaaaccagagtttgttcaagcaatttagcgccatgagttgtgagaatcgattctgggtgaaattgaaatccacaaactttatgtttatcgtggcgaactgccatcacggtgtcgccacaacgggcagaaatagtcagttcagatggaattcggctacctgtgagagagtgataacgggcaacgggtagcgggttttccagattagcgaacatagcttgattatcgtgttttgccagagaagctttgccgtgtaggatttcatcagcagcagaaatttttccaccataagcttcaataatggcttgatgcccaagacagatgccgatcactgggattttgccgataatttgttggagtaattgaggcatacaacctgagtcagatggtttacccggtcccggtgaaagcatcaatagcggagaggagagcattcttaattgctgcataatcatttcagttgccacagtattgcgatagataacaacctgatgaccatgattacgtaattgatcgacgaggttataggtgaatgaatccacattgtcgagcagaagaatatttgccattagaaagtctcctctgcctgatgagcctcaataattgcccgaatgacggctcttgctttgttacgagtctcttcggattcggctaaaggttcggaatccagtacgatacctgcgccaacctgaatcgtcgccatgccatcttccacgtaagcagagcgaataacgatacaattatccatatcccctttgccggtgaaataaccgacagccccaccgtaactaccacggcgttcactttcatagtgagcgataagttgcattgcgcgtactttcggtgcgccggtaagggtacccatattcatacaagcttgataggcatgaaaggtgtctaaatcatggcgtaatgtccccacgacgcgggagaccagatgcataacaaaagagtagcgatcaacttttgtcagatccgcgacatagcgactgcccggttcacaaatgcgggccaggtcattacgcgccaaatcaactaacattaagtgctcagctagctccttatgatctgttcgcatttccagttcggtccggctatcaagatccgcatccagctcgccggccgcattgcgcccacgggggcgggtgccggcgattgggtagatttcaatttggcgattggatgcatcatatttaagcgcgctttcaggagacgcgccaaacagacagaaatctttgtcctgcatgaaaaacatgtagggacttggattgtggtacttaagtttttgataagcatgaagtggtgccgggcagggtaaaaagaagcgtcttgatggcactacttgaaaaatatccccttggcggatgtattgttgcaactgtgccaccatttctgcatagctcttgtcatcccgattgtatgaaactttcatggttggcagagagatttgttgtactggctcaatgggctcggtaatgagtgccactaatgttttcaatcgttgtttaaggcgttgctcttctgcttgagaatcactgaaaagagagatttgcaagcgtgcatttttattctggtggttgatcaccaataacgtttctgcgagataaaaacagaaatctgggcagcgttgaacggtttttactgccggtaacggctcaaatccggccaccagatcgtaggaaaaaaggccgccaacgaatatcgcttctgcgcttgacgaattatatggtgacggctcttccgccagagagagcagggcacgcagtgcatcaaatacggataccgctttcagacgattatcttcatctatattgtgattgatgggtgggaaaatcacttgaagagcattgtgtgttatttcagattgaacgtcgctggaaaatttgttggccaaaatgggtaataaatttcgcccattttctgttaacgcgtcaaaagtaacctgattgccgttggcactgatgcgcaaggcactatcgataattagcagactttttaagttttttttgctgttaatttccgcagattctagcaataaagttgctggtcgctcaccgcagagctggttgaatagctgcgtaggatcgggttggtaagcagcttcctgctcgattactgtgatttttggttgtttatccgtcattttgtcgtcctgttaataagctatgcatataaaaaaacccgctgattaggcgggttttggtaatttggcactgttgatttatgtgcgtgaccataccgcccttactgggaagttatgccaccaacggatagacgtcatcaatacagccattttcagtgcctcttcattatcactcttgtactagtaaactggaacgaaattggtgtgtcaagtattttttggtacgtttattaaaacgttacaagtagtgcatttcccaccgaatctattcaagagataaccctattttaataactagataaaattgagggttaatttggcgacattttattacggtgtaacataaaatagtcagtagttagagataagataatatagggtacttaattttaataaaattattattttattgtcacaaataactcatattattattttatggtatagctatgatatatatttaataatattaagtatgtaaatcatgtttcatgaaaaaaaagaatttagcgatagtaaaaattggttaaagagcaggattggctggattttgtttgagtcaataggcaaacggggaaaatagataatcaaattttatatcttaatatgaaaaaaagaggtttaaccgatattactgtgagaagtagtattcataactctaacatatcgtgttatttaaaatttagatctttataagttaaaactatgtaattatttgtatttaatacgttataggtatgtcagatgaacgattttttaatctgaatacttatagatctctacttaattctggcatcggtcgccatgatttaactctctgatgtttaaaataattgtactattagtggagtaagatatgagtgaaaatgaacccaaagcagatagccaattggtgtatgaaactgatccatataaggttaagaattcggaagaaggcgcggcgcaaaaaacttatcggttaaatggttttgatcctaagacaaccgatggggcattatcctataccccaacaagactcgctaaaacggtttttaatatttatgagcagaaggatgattttggcgttttctgttatttaactgattggtcaatctatgatgcgcgttttattgacacagcaagcgaagatgattttaaaaagaatggtggcagaagctctgacttaatgcgctttaagggtgataaagacaagggaaaaccgtttcagcgaattatctttagctttgcaggtattattggtgatcccggagagaagaaagcaactatcattgctgctgcgggtaaaaatggatggaaaatgggggaggacgaacaagatattcttgagaatcacgaaggcaaacctattccaattgatccctgggctgatgttggcgcttatcttaattgtggctttactgggtggaagggggatgtttgggatttatatgaacaagctaaagcacagggagtattaggcggtttacgtttactcaaggaggaaaatccagatctggaaatttctgtcagtgttggcggttggtcaatgagcggtgctttttataaagtttgtcgtgatgagaaactgcgccaacggtttgttgagggggttaaagatttatacaccaaattcccgatgtttactcacattgatcttgattgggaatatcctggttctgcgggggaaagtaatcaatttgatgaagatgattataagtattttgctgagcttattaaggatttaaaaaactcaaatatcagtaatttgaaaggaattagtattgcagcttctgctgatgtagaaaaaattaaagccgcacatattccagaattgatcgctgccggtgtcaatgaaatcaacttaatgacttatgatttctttacattgggcgatgggaaactttctcatcatactaatctttatcgtaataaggatgaccagtattctaaatattcagtcgatgatgcagttaactatcttatctctttaggtattaataagaaatttatctatattggttattcgggttatacgcgtaatgccagaactgcggagttagagagtaaggataatgaacagctagttggtaaatatactgatggaacatccacggtagggagttttgaatacagcgtaattgaatggacagatattatctataactatgttgattatgaaaatcaaataggtcgtaatggctttgcggttattcatgatccggttgctaaagctgattatctttacaataaagatctcaaagtatttatgtcgttagatacgccccgctcagtaagagataaaggccgctatgttaaagaaaaagggcttggtggtttatttatttggaccggcgatcaggataatggcttattaacgaatgcggctcatgaagggttaggccgtaaagcagttaaaaaagtcgtagaaatggagccattttatttcgaaggtgaacttccttcttacgataaaccgaaagagaaacagtgtgaagcatgtaaattgaattgaatttatgctttaaaaaatctcactacttaaagtggttatagtctctataactattctgttcaggtgtttccgattaattaggttgggaataatataatggataaatataaaagcatttctcgtgaaaaacaggatataacacaagtatcaccattattagctgcggtggcagaagtcaaatcatcaaaattgccatcaggttataggttattaaacgcagtagagaaagaagataattccactatcacgctggttaatacactccagcgtctgggttatcgctcaatttttgatattgcagaagtatcaaagcagagatttattaaacgccataatgaatctttatcaggtcatgcagaggtaatttttgataaagcagtgagtgcggctaatcaattggtacaaagttatcggcaaagacaattgagggattacgatggcgcattattaacaaaagcaagccatcaggcaagatattcttcttatagtaataatgatgtaaatgataaagaaaaattacctgattatagtagtttatttcctgagccttgggatagcttttgtcagccaaacgctattgagtccctcgacagtccggtaaattacctgcttgatctttataagtttgtacaacaaatagagttagatggctctaataatgccgtgggattggaacaaaggcgtgctgatattcctgacttattactgaatagtgataatctttacaaagagattacggcaatatctattgtgaatgatgttttgtcgaagagtgccagggaatatattgatcaaacaggtcaggcggaaaaaccggttaatcaggttttgggagagacgcgttttccctttacattaccctatagtttaccctctcaacagatcaataaaggtttggccgaacaagagactgaattaggtacaattattcagcaagtgaatcaacaatttccttggcatatcttaacggaaaaacgagatcaggctctgcttgcttatactcaattaagtaaggagcaaatgactttactgacagagaaaagcccatttgcacaaaactttttatcacgcgaacaacttattaatagctatttcagcacaagtacaacagaagtattgcctgaacatgatgttgtaaaacatgcttatattattcatgctgatgaaaatgtcactggcccgacattattgagtgataatgttgataaagcctatgatgaaattgttgttacctgtgaaaataaagctaaagagacgatcaaagttaaacttcgtggtgaaaatgttctgacctacaatcgcataaaagcgaggatggagccttttgataactcatcaccatttagtcgacagttaaaattgacttatgtagaaagtgataatagtgatatcggtaatttagataatggtcctttctttggtgaaatgacagtttatgctgcgataccaggagagaacacaaataattcttcggtaaatattgaaggcattaatttcctgaccatgacttaccgttttgctattgcgaaacaagggacggcacaatcagaattattgccagaagctgaacaatttttccaagataactatggtgtttctgcggatgaaagtgtgaaattaaaagagattttatcttttggtcaacaaacaggctcgaaagtaacagatctcgaacacttgtttaatagtggtgatttccggcctttagtttcgccaaatgtggtattttctaatcctatcttcgatagtgggcaaacatcagaacactttcctgcaccttatcactatggtggaatttatatcaatgcggggcaattagacgcattaagcattgtgagaaccgactctggacgggaaatagatgcagtttccgattttcgttatgatcgaatgaaccgctttattcgtttacagcgttggttagcgttaccttatcatcagcttgatttattggtaatttcagcaataaaagcggagtccaataataccgatttggctatctctaataatacattaagatcattaggcttattccgccatttatcgacacaatataaagtattaccggaggcgtttgccggatggatatatcgaattacgccatttgctatcagcaataatattccgttttttgatcaactgtttaatcagtctaaactttttgatcagcctttaattctggatgggaaagaatttaattatacagaaaatcaaggtgatggagcaaaaacagttaaacaattgtgtgctgggttagccatttctttatccacatttcaagtgattgcgcctattgttgagaacgcattgaagctctcttctggcaaattggtgcgtaatcttgatgtcgtatccagactttatcgcttggtgactattccacgattatttggtttttctgcggaagatggattaattctggcggatattttaaccgataaaagcgaatatctggcaaatataccggctttaggagagaaagatgacatcctcagtattattgctcaaatggaagttttgacttcttggttgactaaaacaaaactgacaccgatcaaactttccttattattaggtaaaactcagcttccggtcgtgccaacaagtggtatgttaaccttttataagggaatttctgagggtttgactgataatgtatgcttacaagaatctgattttaatcggcaagaaataaataatatagattggtggactgttctgtcaggtgaaaatggcatttttgataaggaaaatggattaatcaaagatattccattgatatggggaaaaacagatgaggaatctctgaggaaagaaatagaagatattgtaacgaatataagcccagatgataatcaaattaatattgtcgtacagattatattgcaagctaaaaccgcacaagagagtctattatctagcgctattgcgggtgaatatggggtatcaagagatattgtgccactacaattgcgttggttaggaagtagtgtttattcagtattgaaaatggtgttagataatacaccagaaaaagttgaagatattaaaacagagtttctggacttgacctatagtctgttagtttatacccaattaattaatgcgttgagcataggtaataatctattgttattacgcctgacaaatccgaaatggcttgggctaaatatagatgaaacaacagaaatagcattgtcattagatgaaattttcctgttgaatcgctatcaagatttactggaaaatgcgaaacaaaatgaagataaggttcaggaatactttacttttgctaacagtgaaattttaccaaagacagaagaggatgataataattataaatgtgcgcaattactggctgaaattttagattggagtcctgatgaaatttatcttgcttgcgataaaggaggattagaaagaaaacgtgcgataaccttatcccaaatagattggatacgacggctacaacaattttctgtgaaaacccatttatctgttgagcctttattaggtgctgctgcacttgatgttaattcagattttgaagctttccaaagcatcggtgaagcggtaatggctgcattaaaagcgcaaggagatgatgagaatgtctaatttaattgaagcaaaattacaggaaaatttgcgtgatgcattagttgactattatcttggtcagattgtcccgcatgatatcgattttcaatctcagcgtgaaggaattaaaaacgttgatgacttgtatgattttctattgttagacactcaggtttcttccaaagtaaaaacagcccgtgtcgcacatgttacccaatcggtacaacaatatattaaccgtattgttttgaatttagagtcaggtttatcgatgactcaggaagaggcagataattggcaggagtttgctaatcgttatggttattggtcggcaaatcaacaactggctatttacccggaagtctatgttgatcccacattacgtttaaccaaaacggaattctttttccaacttgaaagcgcacttaatcaaggtaagctcacggatgatgttgctcagaaagcaatattgggatacctgaataattttgaagaggtcagtaatttagagattattgctggctacgaagatggtattgatattgccgatgataagatctatttcattgctaaaacacgaactcaaccttaccgttatttttggcgaacactagatgccaaacagcgtaataatcagactgacgaactcaatcctaccgcttggggtgagtggaagctgattaatgttcctttagaaaatgcctataatggtattattcgcccaattattctaaatagtcgattgtatattagttggtttgaagtttctgaagaaaaacaagataaagataatagtattaaatatcgcaccaaacttaatttggctcatttagcgtttgatgggacctggagtaccgggacaacggttcgtgaggatttactcgaccactcaatgaaagagttgattgcggttctcgatcgtaccggagacgctgaacgtttagcgttggtggcatttgtacgcttgaaaggttcggatcagggaacaccgtacgattatgatgaagtcttcacttatgtttgtgacaacctattaatggaagcaacggatttgcccaaatccacgtcaacattatctgaccttgatgcatatggtgctgctttagtctggttctatttccgggaacccttaaatggtggaccggaagaatataagcaattggtgctctatcccgttaataataatatgaaatggccgattgccgaaccaccaatatttgaaggacaattgggtacagtaaatgatttcaagctagatgcaacttatgttgacgggacattgaatatgtatcttacgtccacttcaacgtatgtatatgattttagcagaagcaaaaatatcctctattgtatttggctagaagatagcaagggtgaacgctgttggcttgattataagatactgactccagaagattatgatccaaagctgagtgtcacattgaaccgttgtgatagaaatgatgtaacggttgttacgggttttagtttgccatcagaaactggagatgttgcgggtaaaattaaaactaagctcagtgtaggtaaattgcttcgtggcaagatacaaattaaacagactaaacaaactcagtatttgcaatttccaaaagaagagcagccagaggagcaacgagaaagttggtattctgacaaagcgattcgtttaaataccctgtttgcaaaagagttaattagtaaggcgagtcaaaaactggacaaagttctcagttgggaaactcaaaatattcatgaagagccgattactggcaatgtttcaaaacctattgaccttaaaggggcaaatggtatttatttctgggaattattcttccatatgccatttatggtggcctggcggtttaatgtcgaacagcgttatgaggaagctagccgctggattaagtttatttttaatccttttgaaagtaatgacgaaccggcgctggaacaagataaaccacgttattggaatagtcgcccgatcattgacgagcccaaaagattacgcagtctgatagaaccgactgatcctgatgcaatttctgccagtgaacctattcattatcgtaaggctatttttaacttctacgttaagaatgttattgatcaaggtgatatggaatatcgcaagttacagcctactgccagaacgctggcacgtctgagctatgcaacggcaagttcattattaggtgcgcgtcctgatctccaattagccagttcctggcagccaataacccttgaggatgcatcatataagaaaaatagcgcagtacgtgcattggagatgatcagttatcctttgccttatgccccggtggttcatgataaaacaattcgtgcgctggataatgatctctttatgaaaccgattaatgaagagttaacggccctgtgggataaaatagaaaaccggatttacaatttacggcataatttaacgctggatggtaaagaaatttccatggatctttatgattcaaagatttctcctcgtggattaatgaatcagcgttatcagaaggttgttgctgccagaaatgctagcagaatgaatttcagagtaccaaattatcgttttgaaccgatgttggcgcgggctaaatcgggtgttgatacgttgatacaatttggtagtacgttgttaagcctgttagaacggaaagataatttgagttttgaatcattccagatggttcagaataatgatctctaccgttttgcggttgacctccagcaacaagacatcaatattaatcaggccagtcttgatgcattgcaagtgagcaaacaatctgctcaggagcggtacgaacattataaaagtctttatgatgaaaatatttcgtcaacggagcagcaggttattgaattacaggctcaggcatcttctgctctattagcttcacaagtatcaagaacagcggcagcagcactggatttagttcccaatatttatggattggccgttggggggtcacgttggggtgccgctttaaatgctgttgctgaaatagcaactttgaaatatcagtctgataatactaaagctgaaagcctcagtgtttctgaatcttatcgccgtcgccggcaggagtgggaactgcaatataaacaagctgaatgggaaacaaagtctattgatcaacaaattaatattcagcagttgcaggtcagtgccgcgcgtaaacgtttggtgcaagttgaagcgcaacaacaacaatctcaggcactgttggcttatttctccagccgttttaccaatgaaagtttatatacttggatgattagtcagatctcaggcctctatttacaggtttatgatgctgtttcatcattgtgtttatctgcacaggcctctttacagtatgagcttgggctaggcgagcagaattttattgatggtgcgagttggaatgatctctatcaagggctgttggttggtgaaaatctgaaattggcgttgcaacgtatggaacgcacttatgttgagcaaaattcacgtaaattggaaattatcaaaacgatttcgcttaaatctttattgggtgaggagtgggagacaaaacttcaaaccttgaaatcgcataaccaaattacgtttaatttggatgaaaccaaacattttgttccagattatacgggcttatttaatcggcggattaaatcagtttcagtgacgctaccgatgttaattgggccttatgaagatatttgtgccaaattaagtttgtcgggtgtgagtagctatacgacaaaagcggatctcaaaaccgttgaaaagatgttaaaagagggaactcgtgcggaaacaccttatacggtgcgcagcatccagcctaatcaacaaatcgctttatctacggggattaatgacagtggaatgttcacacttaatttcgatgatgaacgtttcttaccctttgagggggtaggggtaggatcgagttggaatttccaatttaccaatacctcacaggatttagaaagcttaaccgatgttattcttcaaattcgatataccgcacaagaaggatctgcatcatttggctcggctgttaaggcattattgagtaaggaaaacccagatttgtgataacgagaattaagcattaaatgaatcagtcacctgaatttaaaatgcttactcattatctttaacattcaaattagcctcttctaatgatgtggaggctaaatataaatcgcattggagtttataaatggtaaataaatatacttatacctcatcgaaatccatgtccgacatcagtgatattgttggtgaaccattaactgcatggaataatcaggcaggcggccaagtttataatgttatttttaatagtggtgtttataccaatacctattgggttgagcgctggcatattcccgatcctacggctaaagagggaacaccgcataatgcttggaaatatattcgtccagcgacggaagatgagataaaacagcacggaaatcctaccgatgggcgtattgatccaaccgaagatattccttcaccagttttacaaccggatgctattacagaacaaacctatcaacggccggatgttaattttaaacctgatggttcagcgggtaatctttcttatactgcgtcgcgtgtttgtcgcccgatgtataatgaatatgaaagcgataaatccagaccaaaactttctgcttatattactgattggtgccaatatgatgcgcgcttagatggtaaaaatgaagacgctgatcagcggggaagaggatttgatttaagcactatcaatgtggctgcctatgataaattaatattcagctttttgggtatttacggtgatactggtgtaaaaggggataagatcaaagaagttgccgatggttggaatagccagagtgaaataaaaattactgaaggccatattgttcctcttgatccttatggcgatttagggactgcccgtaatgtgggattacctaaggaaagtgctaacactaatattaatgcaggaacatttctgcctttttatcaacaaaagaaagcgtccggtttattaggtggattacgcgaattacaaaaaacggcgcgtttagcgggtcataaacttgaactggcttttagtattggtggctggagtatgtccggttatttttccgtgatggcggctgatgaaacaaaacgtggcgtttttgttgacagtattgttgatttttttgcgcgctttcctatgttcagttgtgtcgatattgactgggaatatcccggaagcccaggtgaggatggcaatgtttacgatccgaaagatggagaacactacgctctgttaattaaagaattacgtgagtctttggatagtcgatttggtcgagaggatagaaaagagatctccattgcttgtagtggtgtaaaaacgaaattagcaacatccaatattgccgaattagtcaaaaatggtctggataatatttacttaatgagttacgactattttggtactggttgggcaccttatatcggccatcatactaatctctattcaccaaaagatcctgatccatcaggcgcatctgatttatctgcggaagttgctatcaattatttgcatcaggaacttggcatacctttggagaaaattcatttaggctatgctaactatggtcgtgcaggcaaaggggcaaatcttgaaacgcgtgaatataataaaacgggtgaggcgttaggaacaatggaaaaaggttcacctgaattctttgatattgttaataattatctggatagcgaacatactctcgctaccgggaaaaatggctttgtgttaatgacagataccaatgctgatgccgatttcttgtttagtgaaacagaaggacattttatctcattagatacgccacgcacggtgaaacagaaagcggaatatgttgctacgaataaactgggcggtatattttcttggtcaggcgatcaggattgtggcttgttggcaaatgcggccagagaagggatgggctatattgccaaatctaatgatgaaactatcgacatggggccactctataatccgggtaagccctattatttgaaatctatcggttaggtgaagaaaaacgccggttaattcttctttgccaataaaaagggatatcgcttttcttatctgtccgtttttccattcttaaaataatcatgtttagcccgatattccagggctgaacatgattatttctgtaaaacgcgaccatttaccgttaagctatcccatcaagcgttttaagctattcgggcagagaaagagataatgacaaattcagccactgagttagtaacaatttacgatctgcatagccatacgactgcatcggatggtttactttcaccagcagaattggtcgaacgagcggtggcaatgggcgttaatgtattggccgtgactgatcatgatacaacggatgctattttgccagcccatgaatatatcaaccaacatgatttgccattaaagctcatatcaggggttgagatatccaccttgtggcaaaatatggagattcatattgttggtctgaacattgatattcagtcaaatgcaataattgaattacttaataaacaatctgaactcaggaaagaacgaggaattgaaataggtcgcaagctggcaaaggtgggtattcccgatgcttgggcaggcgcgagccgattagcgaatggtggacaagtaacacgaggccattttgcccgttatttaattgaaataggcagagagccaacagtggcgaaaatatttaaaaagtatctggcaaagggaaaaatcggatacgttccaccgcaatggtgtacaattgaacaagctattgatgccattcatcaatcaggtggtcaagcagtcattgcgcatccgggacgatatgatttatcgaccaaatggttgaagcgtctgattgtctggtttaaacaacatggtggtgatgcaatggaagttgcacagtgccagcaggcacctaacgagcggaaatatctcggtcaattgtcacgggaatatgatttgatggcttcgttaggttctgattttcaccagccttgttcatggatagaattagggcgtaaattgtggttacccggtgatgtggtaccaatatggcgtaactggtcactgtaggggctgcataaaattaagaggtaatttatgagccagtttttttatattcatccagataatccgcagccccgcttaatagggcaaagtgtggatatgttgaaaaaaggtggggtggttatttaccccactgattccggttatgcgattggttgccatctggaagataaagattcgatgactcggatatgccgtatccgccagttagatagtcatcataatttcaccttaatgtgtcgggatttgtcagaaatatcgacctatgcttatgttgataattcagcttttcggctgattaaaaataatacgccgggcaattacacgtttattttgcgtgcgacgaaagaagtccctcgccgtttgatgaatgataagcggaaaactatcgggttacgtgttccatccaatccaattgccttggcgcttcttgaacaagtgggtgagccattgatgtccacgagcctgattttgccaggcaatgattttgctgaatctgatcctgaagaaattaaagataatttgggaaaacaggttgatctgattattcatgggggttatttagggcaacagcctaccaccgtaattgatttaactgaggatacgccggttgtaatacgggaaggggctggcaatatcacgccattcttataagttacgcagtaattattttcagaatctatataaagcctgtgtattatacgcaggctttatatttttgattttttaattgaatcgaaatggttattgttatttcgaattattaatactaactcaataaaataagaccatcatctatttaataattaagttgattttaatagtgtgataaggaaatatttacctcacctaaggtaagtttattcgctgattatttaatcatattattaggtataaaacctttgggctggctatttaatataaattacagcgtaaggttatccattcattataaaatcaagggatattgaaaatgtcagttgttaatttctccgataaaccagttgatggcgctaatgttcatacatggccgaaatcaccagatagggatttaatcgcatgtggacgtgacgcatatgctgaaaaaacagtgcaagaagcattgaacggagatcctgataaagcggtaaaattaagtgaattaaatgatattctggctgcctgtgaaccttttaactttaaaggcgtcactttatatgcaaaagatcctgtcttggccttaattaaagcgttatcagagaagagtgcctatttagtcgatgattcatatcctcctaagcaatggcagagtgggggagttgataagcataaccgtattaaagattttattgaatctccgggtatgtttattaaagggatagagatgatcgatatgggtcagctttatcttggtaattgcggctttgttagcaccattggggcaattgcatcccatcctgaagggcataatttgttattttctgctatctatccaccggtttataacccaacgggcatttattcgatcagaatcatcaatcaatcgacggttggttatttattgattgacgatgatctgccacgagtgagtttttctgctatggaagataaaaatgagttttggtattacctgattgaaaaagcatttgcgaaattgcatggaagctatgagaatttaggcggcggtaatgaaatctattttggtatagaatcgacagcaaataccagtattaatcagggtaatcaggatcgtatttgggatgagaaatttatcgatatcttcaaaataaaacatcatgtgacttatcaaggaaccggttcatcaacggatttagtatcaggtcatgcttatttaatattagatgctcagcaatggaatgatattaagttagtacgactgcataatccgtggaatgttgttaaatataaaggtccatattcgcctgatgctgctgaatgggaaaatattccagcagacgtgcagaatgatatattccagaataatcgatttgaggggaagtcattctggatgccatatgatctctatgttaaaaatttgccaaaaattagtgatatgtatctcagtaaaattattcctgattcactgaaaagtattgcaaatccctctccaattcaagagtaataggatataggatttgccaggattgatttgtaggtcattaatttaatattagtgcctgatatgaatggcaagctaaataaaagcttgatgaaacgtggcctgaaattttataattcatggccacttttatattattaaaaattatatttattaattaattttactattgaaagaatgtgtggataagtcaattgtagaaaattaactatttatgggtattggtagtttattatatcgggaggtggtcttttaaataattataattgctcatatatttggccaatcgtgttttagctcggtttatgtactaatatttcagtgtttttccaatgaattttagtgttgagtaataaacaaatatgctgaattgtaatataaagaatttccattagcctgggttttgattaaagttcctttcgagggtttttatgagaactgtccaaatacagttgatcgcctttcttgattatatcacccagtttactggctgatatgatgggctataaattccctgtgttagcgtattgctaacacagggagagtggtcattttattaacaagagatcacccaaatccatttgcatactcttaaattttacaaatattctttaggtatatttgatagttgctcctctagcgaccaattttttggcttggatttttcagagttccattttgcgcctttatccaaccatttggatctataattctttaatgctgctaaaatagcgtcttcatagccaaactctaccccacaacaatcacagatatcaaatgttggtgagttaccatcttcaccccacggaggatctaactgttctgcaccacacacacggcatacatataatctattatttttgtgcattgaagtaatccaaatttgtttcatatccatgatctactggatttggtttaaacattgttttcgggacattatccacattttttactgcaaaaatatttgtttttggattgtaatacaaggtatcaccattagctcgggttttgactaaagttccttttggaggatttttaataaaattatgggtggcttcgacatattgttttgaattctgatattcagggaattcacttttatgtttatcccagtggccgtaagcatttgctacaggctcttttttcttcgtttctgtccatatctgagtttctttcgttttgcttgagcctattgtgttgccaacatgacgactcttcccaacaatcgaagcaaccgaagctttaccgccgatagcaccaccaataccggcagattctaccgcctctttggctatcagtgcacctttttcccaagctggcaacgagttatacaacagccctaaatcgttctggttttctgtcgtcacaaactggctgagacgatgagtatcttcagccgataagccaaacatccatctcagaccactgatggcatccgctgtttttatcccaccttccatttcagcctgataggtcagtgtgcataacccaccgttcccggcacagtgagacaacatttctgcccgttgtgtagcgcccagtttgttgtatttgttccagattgcttcggtaggggttccttgcttattggcttcctggagctctctagccagattgtaggcattcatggagttcaggtggttaaagagaataacaatttccccggcattagccccactgttagcccctttggcgctgttggtcgcaatggcccctgcgacgctgccgatgattttgccacccgcctgaattttcattggatcattgaatgttttatccaatgttatcgcggccaattctgcggctaatgctccagccgccgcccctttggcatcaccgccgccaatttccgcagcaagggcagaaaccgccgcatggctaatggcttttccgggtaaatctaacacctgaccgttagccccaatcaacccggcaccttcggcgttaatctggctgccaatattggcaagtaatgcggtggtaaaattgtccttaaaactaccgccattgatggctgtaccaaggctggaactgataatggattgaccggcgatccgttgagccactttgctccagtcgccattgctcagtttaggtaatgtcgcttttgccgggtcaatttgagcgccattggcggctttatcccatcccatgacgttatcaaaacccgccagtgcgccacccatcgccattgatgtgatagttgatttaacggtatcgctgcttcccatatccttaagggttttcgataggtttcctttattattaataagcttaactgctgccgtagaagctagagatgagatacccgcagaaactgcgccgtatgtggcggtattcactgttgctgctgttgcagcactggctccggctgcggtagcagcaccactggctgcacccgcggcaccattggcagccgctacagttaccccggccccagccgtgactacagcaacggtgatagcgataacagcagaaacgacaggatttaaatgctggctcttatgatcccaattctcataagcatcctgaacttcattccagtttacatcttgacgttggcttaactgttttaaccaggctgtttcagaagtgttaccaagagcagccaataccgcctgtaaggattgtcctttctgtgttttgatatcagcactgattccatttgcggcctcaatcgttaattttccaccaatgtgaactgaaggcagcacccatgtttctgcacgatgaccactatctctgttcttaatgaaaaatcctttagactggctaatggtttgttcaaaagaactatctttaactgctttaaagtttatttttccatgtgtactggtcagtctggcatttttatttgtttcaattttgctggcttcataagtactgtcatctcggctgagtaaattaatatctccatcagcaataaattcagtcactttattggtgactgaatggtgcgtggtagttgaagtcttctttttaccataccacttacgtttagtactggaggtggtatattcagtcacatcttcttgtgcttgtgcataaagataaccccctttagcagcaatatctattacacctttagctaaaagtttagttgcttgaaataaaagaccttctccggtaagaatggttaaattcttatcgctatctagtctgacttctttatgggtaatagatgatctggagttcgtgttttcagtatctactgcggatttaaggtatgtgtacccaccagaagtgagggtcatatcacctttagaaattaaacttgaaccttctaactttatattatcattagctattaaagttaattcattccctgcattaacagaagtaatttggcttattcttccttcttttatcatagcgcctacattataataagcaacagataaatttagatctccaccagaattcatcaatatattttctgttgcattcaatgcagagttggtgacattcaaatctttccccgccgatatagagatactattagcggtaataggaactccccataatttagagtcttgagcagagttcaatataacctcttttcctgcggtgagttttacatcaccaatatctagatttataccaccattaatggatatggactcggatgagtctatactggttttacttatgtttattttaatatctctgattgcagttaaattagtatttttgttttttgtgaaataattgatgaaatttaaatttaagtttgttcctgaataaaaggttaaatctcctgaggcgtttattatattacttcgatcatcaatctccggtccaaaactaatttttgtagatttataggcggatattcctgaatttttgcttattaatgaaacattatgtccttttaataccgttgataaaacattaatggcagagggaaataatagtttatcaaaaaattcatatggtgctttataataggttgaaagtatagataaatcacctgatttagatatgattttagaatcggtaagttcgacaaagttagcatctgatgagataatgttgatatctttttcagcatttaatcgtgctgattttaatgtaaatccatttgcatttaatataagattatttttaactttgatatcatcagtttctgaatttaataaatttaatgttttttctttccagtcaggcgtattcaactcattttcattaataagttccttatttgacgtaattttaacttcgccaagaaaatcaataactaaattccttccagaagatagcattgtcttatttgtgaatgagtcaatttttgtttcattagaaggattatttcgaagaagattccaatcttgctgttttatatctgcgttatttctatctaatacatgtatttctctgtcgttttcctgcctatttctgtatttatagtatggattattaaatacaggatgtgaactatttattataaaatgtggataagtatttccattatatagattttcagtatttataaatttagtgcttgtaaaatgatttccggtcaaaaatacatcgccttttccatgtatttcactgtttatatttaataaactatcactatttatatataaatttcctccggaggaaatcaaactgctatcataattttctataaagaaccaattgctcatgtcactgagatcatcaacattactaaagtcaagaaaatcgtttttttcaggtttaatattagaaaggagataaagatctcttatattgagcatcttatgagatctggcaactaaatcgcctttattagtctttatggtagcagatctattttcaataagatgacttttatctccttgtgcatttttctgtatccacatattatcgttggcttgtagtaaggctttattaccgctattacgcacagtattgacaaatatccgcatatcccggccagcagtcacgcttcctttattatccagcgtggtattttccagaataatatcccgtcccgcctgcacgttaatattgggcgcaatatgggtttctttgccaataacattcaggtccgttttagccttaatattgcccagttcaattttgccattggcgtttaaagtaatatcacgctggtcactgattaaatttttcagattaacaccaacgccctcttcagtggcaaccagtcggattttattggcatacatgccacctaatgctttggtatcaacggctaattggggtttagcgccttcaccagcgacaggtttaactgtgccgtcttttaaactgattcggttagcgccttgtgtcagagacaggttattggcctgaatttttccatttaattccgttgcccggctgataatatcgacataatccgtcgccttgccatctaaccctttaccgccaatggtgatttggcctgttttaacttccaatgcttccaacgcaccctgtttatcaaattgcggtttacccgtggtcagtgttgcactcgaagtattaataaagccacagccatcacaagtaatgccgttggggttggcaatcattacattggctttattgccgaaaatctccaattggccttgcaggttagattgtccgctgccggtcacttcattaataatcagttccgccgcttttccatgcagattagggttagcgttaagttgccccgccagttgtgattgagccgcttgcgtggcgttattgagtacagcgccttgagtatcgacattgaacgctttataggtgttgtgggatatccccgcgtcattcggcgtggcaatattgacaaccggaacgttgctttggttttgtacctgcgtatggttattgtccggtgtgatccccgcagcaatcgccgggtgtagcggctgaattgccgtcaggtaaattaaaagataactcgtgcctctcgccaccgagttgttgcgtttactcatcgtactatcccttttgtttaatttaagtgttaaaaagtcagtgatgctaaccaataagtgacctgagcatctgcggtcaggcttcgggtataaaatgaccatttaccacagagaatattgattatttaatagttacattattgaaccattttaatgtgtaattaattgaccgtcagaatgggtagtatgaaatgtgatcggtactgggttttttaattctgataatggggaatccgtcatattaaatgtcggtaaatcgcgataaggatggagatgttgttcccttacgccagccatgatgttttcagttttagcgtgatgggaattgctggattagaatcattgtgtctgaaattagtgtagaatgctcggccacggagttagaatgtatgagctattttctagcattctatgctataaaatgcattaaaatcagtttgttatgattgaatttcactattaacgtattgattgatatataacacgacgcctgtgaaggcgacaacagaggttgctcaatgagcggtaagatacagaaatctgaaaagttacagaaaattctcgcgcgttccggccacggttcccgccgcgaaatagaaggttatattcaacaagggcgcgtcagtgttgacggtaagattgcgactttaggtgatcgccttgaagttcagcccgccacgaaaatccgtctcgatggtcggatattaaatatcaaagaatcacaaaaaacggtttgccgtgttttggcttattacaaaccagagggtgagctttgtactcgtcatgatccagaagggcggccaacggtttttgatcgcctgcctaaattgctaggttcccgctggatagctgttgggcgtctggatgtgaatacttgtggtttgttgctatttaccacggatggtgagctggctaatcgtttgatgcatccaagccgtgaagttgaacgcgaatatgctgttcgtgtctttggtgaagttgatgatgctaaattgaaacaactggctaagggcattcaactggaagagggtcccgcctcattccgcactatcgcgtttaaaggcggtgaggggatgaatcaatggtataacgtcacgctgacagaaggacgtaaccgtgaagttcgtcgtctttgggaagcggttggtgtacaggtgagccgtcttattcgtgtgcgttatggggatattggtttgccaaaaggcttaccacgcgggggatggacggaactgggtctggagcagactaactatttacgccaattagtggatttgaatgaggagacggtttccaaagtggccgttgggcgtgatcagcgccgtcttaaagctaaccaaatccgccgagcggttaaacgccatgctcaagtcgcatcgcgtccatcggcaggaaaacgtccgggcagttcacgccagaaggcggggcgaacaaccgcaccaaaaggccgttaagttttctgggtctcgtgtgttataacggggccttttttaccaatcgatccctttttgtgctttgatgccggcgtcaaaggcatgttttaccggacgcatctctgtcacggtatctgccatttccaataattcacgatgacaaccgcggccggtgataataacggattggtgctccggtcggtggttgagcgcagtaataacttcttccagaggaagatagccataactcaccatataagtcagttcatctaaaacaattaaatccaaatcgggatcagataacatctctaacgcatggtgccatacctgctggcaggctacagtatcggtttcccggctttgagtttcccaggtaaaacctgttgccatcacatggaaattcactccatgctgttccagcagatttttctcgccattctcccatttacctttgataaactggatcacaccggcacgaaatccatgacctatcgctcgggtcacggtgccaaatgccgcagtggttttgcctttaccattgccggtaaaaacgatcagaataccccgttctaactgggcggcttcaatacggaaatccactttttcttttaggcgttgttgccttttttgatgttggctgtcattgattgtcattattcggctggtcctgctttgcgtccgggttgggcatcaaaactgatgcctgttttatgcagactatcgctgcccataagataaagatacagtggcataatatctgccggtgttttcagtttagcagaattttcgttagggaatgcgcgggtgcgcatatttgtgcgtgtaccgccgggattaatacaattaacgcgtagagaagtgtgtttatattctgctgctaaaacttgcatcatgccttcagtggcaaatttagaggcagaataggctccccaaccacaacgaccttcgcggccaacgctcgaactggtaaagattaatgatccgtcaggtgacttcaataatagcggcaataaggcttgcgttaacataaaggtcgcattgacgttgacttgcataacatcatgccataattgcacgggttgctctgccattggtgcgacagctcccagtaatccggcattatgcaatacgccatccagatgcggataatattgcgctaaatcgccagcgaatgcctgacactcttcggctgtggcggtaagcagatccatagtgtaaacagttgcaggggcaccacctgcttgtttaatctctttttgcacagcttccagtttgtgtgttgttctgccaagtaagatcacttgtgcaccgtaacgggcataggtcaaagccgcttcacggccaataccctctccagcgcctgtcactaaaataatacgttgttgtaggaggtcatgttttggttggtaatgtaacatttgaaaatttcctgttattgacggcgcgatttgttaccgtcggaggccgttcaggctatcaaaacagaaagtgatatattgagtcaaatttgccaaggctgattgctcaggagataaacggagaaacattgcgggctgtgtgagtgaatgttagtggcgcagtgctgtgttggtagttatttgtctttagctaatgtataattcttttcgtcagagactgggtatttaatccaatttcacaccggagtgatgatgatttcaatacaaacagaaagagcagcccttctaatttaatcaatttgttaaattttacattagaaggggaaaacatgaattactcaaaggttgatatagatctctgggataggaaagagcatttcttgcattaccgtaatgttgtgcaatgcggatttagtctaacagcaaaaattgatattacccatttgttatcttcgttggtggaaaagcaatataaattctatccaaccatgatttatttaatatctacagttgtaaactcttactctgaattcagaatggctataaaagatgaagaattaattgtatgggatggtgtaaatcctgcatatacaatctttcataaggaaaccgaaacattctcagcaatttggactgagttcaattctgatctggcagagtttatgaaaaattattctgctgattatgaaacctacaaagatgatctttgctttttttctaaaccagaactacctgaaaaccactttcacatatcgtcagtgccgtgggtaagttttgatgggtttaacttgaacatggcgagtgttatggattattttccccccatatttaccatgggaaaattttaccagaatggaaatcaaactcagttgcctttggcaattcaggtgcatcatgctacttgtgacggcttccatgtgggacgtgttattaataacttacaagagctatgtaacgattttatttagttcaagccttataaagctaacctgaattatttatggcttcaatataaggttgtatcggaaatatgttaatagccatcagttaacactggtggttttcacgattgaagttggtcgggatcatgattgcgattggactagagagcataaaaatgtgtggggcacttgagttgtttggctgtaaaatagataattcaaccggattatgacccatgaatacttataccgttaagtggctctcctccagtcaaccctctggtttggcgacgctttaggttgccaggtgaaacttctttaactgtttggccgcataagtgccccacagattttgatggtctctgattgtgctgcgatgtgtgtgatgaggacatctcgcattatgataataagaaatccttgtcaaaacatgtcgatgagatgtacacctattatcgaaaataacagcatgatgatcccgaattacggtgaaatgtactgctatggtgaatccatttccacttcatttgttgaatcgacgatcaatgaagtgattgctaaacggatggtgaaaaagcagcagatgcaatggagtcagcaaggtgcgcattatttaatccagacccgtacagccgtactgaatgatgatttgaaaacccaatttgagcattggtacccgggcataaaattaggtgacgaaacggagcattcttggacagaaaagattgctgcataaatgccccaaggtaatgagatggttcccctcactctaacggcagtatattagcagagtgattatctttgataagaggctaccatcatgaacactatcgcactgattggcatcgatctcggcaaacattcttttcatgtccattgtcaggagccatcgggaaaagctctgctacgtaaaaaattcacccgaactaaattgatggaattcttagccgattgctctccggcaacggttgtgatggaagcctgtgctggcgcgcatttcatggcaaggcggatcgctgatttggggcatgaggctaagctgatttcaccgcagtttgtccgtccttttgtcaaaagtaacaagaatgattttattgacgcggaagccatctgtgaagccgcctcacgaccttcaatgcgttttgttcagcccagaacggaagcccaacaagccatgcgagcgttgcatcgtgtccgggaatcactggtccgggataaagtcaaaaccaccaatcagatgcaagctttcctgcttgagtttggcatcagtatgcccaaggggattgccgtgataaaacgactctccactgttttggccgaacatcctcttccaccttatttggcgcaaatattactacggttacaggcgcattatcactatctggttgggcaaatcaccgagattgagaccgcactgtcacaggaaatcattcaggatgataccggacaacggctgatgacgatccccggtattggtcccatcacggcgagtgtgctttcctcacaactgggtgatggaaaacaatattctcgcagccgggattttgcggcctcgacgggtttggttccccgccagtacagcaccgggggaaggacgaccttattgggtatcagtaaacggggtaataagacgctccggcaactgttggtactctgcgcccggtcattcatgcaacagattgaacaccggcagggaaaactggctgactgggttaagcagcagcttgaacgaaagcactctaatatcgtggcctgtgcattggctaataaactcgcccggatagcgtgggccattacgacacaacacacggtatttgtcgcctaaagctggcgtcattgtgaacctatttaaatgttaccccactggttttgcgaagactgattattgatgacatgaacggcctaccggcctgatgagaaacctaacataaaaaatggctctttcaagccgacaaggttttaaggttcatcaggcgcggaactcatcgaggcgcaggctccttgcctacagtgacgccggatagatttaagcaagccaaaaattcatcaaaatgagtgttgcaaaaacgaggggaaccatagattttttatgctctatatgaacgcatcccgtttgcaagacaaaaattactctggcatcgacggtaggttgcagctctatatccggccttattgcagccagagctgcgggcctcgatgtaatccgctgactggctcctcactctcctaacgagctttaagctcagagcataaatcaggtttagcaagtcacggtcttacctgtctttgtcatcattatcattgccttagcaatctttctgcattcatccttgtcattaaaagtgaaagttgatcggtgaaacacctcagtaaggtctgacactgacgtaatctttttggtattcctgctgatgggcgaccaatgcccaaacggtgcgagccagcttattggccatccccacaatcgccacacagaccggacggcgtttttttagcgccgtcacccacggcagcggggttttcgtcagtaaggtggtcactcttgcaccgtgaataaacagggttctcaggtaggtatctccccgtttactgatgcccagtaatttgacccggcctcccgttcccgtttgtttcggtaccaggcccagataggccgaaaattccctgcccgaccgaaatgcgctgggatcgcccatcgtcgcgatggcggcggtcgcaatcaggacaccgacaccgggaattttcataatccgctgacaatcggcattctgctttgcccacgccgttagttggttttccatttgttcaatttgttcgtcgatttcggtcaaacgatgatattgctcttcaagcagagcaagcaggaacggagccagtttttttctgagtcgctcagcatggccttatccagagaagccctgcctttatgcacggtttcaccaaattccagtagcaaaccatgcagcgcattgatttgtgcggttctgaatttgactaattggtggcgcattcggtgtaatgacagaatggcctgttgctcttcatttttaatcgcgagcgatttgccgggttgctgaaccgccagccaaatggcccgggcatcctgaacatcgtttttatttcccatccggaacgctttaacaaatttagcctgaagcaaacgcacgtcatgccccagcttcctcagctcccgagcccaataatgcgcaccgccacaggcttccatgccaatcagacaaggttcgcggttactgaagaacgttaaaaaatccggcctcctcagttgcttatcagtaagttcaccggtgtattcatcgacaaaatgaatttgcatcaaatgttttgcaatatcgacgccaaaaggagtaaatttcatgggtggatcctccagtcatcagggagcaatagtctcccgtttttaggcactataaggccggaaatctgtgaggatccacatctcatctctcaattccagcacaatgccaaaggctaagtggttgggatgcgttcattacattctcctaatacagataccagcaatagattaatacaaataatttaatatcatgcgaactagttttagtgggataaatacccattcaatagatacaaatcccagcaaatttattttatgtttattccttgccaaccggaaatctaggatctatggttaggataatgattaatttaatacgcaattttaccggtaccacggatgaacgaaaataacgccatgacgtatttgaatgaaacgcgggataaacggttcaacggggtcactctggcgtttgaaagcgtgacaaaacagtggcgcgatcaagttttcgcataagtaaccactgggatactgcggctggattaagattacacgtacccatcagttctatttttcgggggtaacccggcagttcaggaacgaggccgatagcttccaactaatgtaatgccatctataacaggagcacagcatggacaagcagtttaaagaggtcatcgataaattaattcaggcggaaaccgacggattaagaaacctggccttgattgacgtggagtacccgcggcagctagcacattatgtcgcgacggccttttttgacgtttatcacgataagcagaaactctcggcagaacgggccaaggtgattgagcacgtcaccgtggccgtcagagcggggcagcacgatcatgcctggcatgcccagaaagcgctcaccgcctgggcagaaacattttatcaccgccaccacgaccatcttcaccgtgacgacacgctggatacgtgggaccgcgaggctgagacgctcacccttcaactccgggagcatgcagcagatcaattggctggtctggccctcaccctgaaagagttgggggagcgatatcccggagacagtgcatggatactcgcacgctataaagccctggcgggaacgttcgtgctcatgcactacaaaattaaagaattgttacccttgctgggggccagcctccctaaccacaaattcgatcccaattttgatgccatcggatggagcctatttgatgatatccgccgtcagctgcttccctgagccgtgacgactggacgcccggcaatatatcgtaatcaacccgaattcgtcctggtgaggaaggccacggccggacatcacccggatgagaaatgccatcccacaatgaggacaccaccatgactgtaaatattttctttttcctggatcttaagggcattatagacagcgaaacaacttgccgagaacctgtcgtgccgtattaatgacaacttccaggttatgaatcctgcatcttcaagttaagcgggtataggataaacagatgagtaacgataaccacctgacacattttaataagatgcgacatgtgggtgcagaatatcgtcatggcatgacaccgataattaatattattcaacaatgaggaaataaccatgagcactattgatatattcttattattagatgttgataaaataaaaaaagagagaaaatacagtaaaaagaaaaatgaaccagcttccttagataaagatcatatacacatattgttaaggaatgatgatacttttattgaaggaaataaagaaaccctgacttttagtaaaagtaagggagaaattttaaactgggttacaatatcattggccggccctgaatcacactattcggtggtcatgtgtgggtttcaaaaacacgggcctaaagagcctatgaaaaatgtttatgctcatagatacgacaataaaagaccgacgctcaacaaaagcacttctgactctagttctgacaaagaaatctgccctgcggaatttaccccaactttaataccggaataccaatgggtctggacactacatgagacggaaaatacggattatataattatgtttgccttatatgataaagagcaacttatgtcgtactataagttttctctgttcatcacaaccaccgactaggtttacggtgtcgggtcatcgcgtgtggtgacccggaataacctaacgctcaagccgcgcgactttctctcatcatgattttcatattattaccacggcggaggtcctcaatggaattattacatcactctcaggccacgaattttaccggagccatgatgggcggagtcgatccgcgcactggcctgtttactccccagatcccgattacccagctaggtggcaacgatctttggggtcccgacctggccatcaccctgacgtacaatcccttaacttatctcaacacagggtacgggctgggcttttccgacaatttcacccgttatgatactcaaactcaagtgttaaccctggcgaccggcgagatctatcatcgagtggaaaaggcaaacgaagtcgtcgacgggcaggcatggacctttcaccatgccaaacccgcacacttcaaggttaaaaaagagaaagacgctttctgggtactgtataaaacgggtagccgggaaaagttaacccagctagatagggcaaacccagtggccgtggtcagtgaaatctatgcgccttcaggccacaaactgtgcgtaaaatggaatagttttgtcaaccacaactacaactactggcaattgatggaagtctgtgacgccatggagaccttgctaaaagcagacttagcgacaacggaaaagattgagtttactgtatggccagggtcacctgaaagctacaccgtgacgctgaacatgactaatgatctgcttcaaaccgtcatcagcgcatcagagttaacttggcacctggaatatgaaacagagggggcacataagaacattctgaccaaagttaccacaccgtccggattaatcgaaaaggtggtgtatcatgaaacgggccacacactgcccacccctaagtgcattcagtactaccctaatgcttgggggcccggcattattcggcaagatcctaagtcctctacgactgctacagttgaacatttcccttatgttacccaacatcatatcatcgcgggcagcggctcccccgatcaggtcattcgctatgtattttcaccggagaatttcctaggacagaagaataagaacatgaaagacccgatcccccttccccagcaagacaatgcctatctggctaacagtgagtataaatatacatcaacagaggtgcgagagtacaacgaaaagcgctattgcatccacagagaatacaataaatttcatctgctggtatccgaaacggaaacggtcgaagtaacaccctcaagacctcaaaagttaaaagaaacaattataaaatattatgcagatgtgggtaagtcatttgatgataataagcaaccccctcaattcctgatgccaaacacagttgagacgatatggcacaatcctgagtcatcggcatctacaacacaacgcagaaaagaaacaacccaatgggaatataacgcacagtgtaatttaatctcaatgactttaccagataataccacgacaaaaactacctattatgcgcccgatggagaggagacaacagatactcattgccctgccgagccaaacggttttgagaggtttataaaagaaatagcagtggaagccccgtcgccactaacgaaaactaaaataaccatactaagaaaggtaacatataactataaatcgtatgatacatattcccccccaaaaaacaaccaagcctcggttgtcaaatcaatggtcttgccgctatcagaaactcattatagtcgcagggattgttgcgccgaccatctcgaaaaagtaaaaattaataccgtttccttttatgaaaatactcaaaacgcatttttaaacggcagggtggaacaaagaaacagctacctgtttgaaaacggtaaccagacccgtagttatacagaagattatagctggagcaatgagaataagaatggagcatcttgtattaagtgtaaaacaacaggctcagggaaatgcggtacccccccggtatcccacgaacaatactggagcaggtccaccggtcgcctgattttccaaaaagatgctcaggacaacaatacggtatttcaatacgataccatcggccatctcatctcaagcaccattaatgcggacactgcctacgaaaagaccgtgaaatacgcttggtcctattcaaataaaagggttacggtgacgcagacggatatccatgagaaccggtatatcaccgagatggacggcctgggtcgtcccctgaagaaaagttattcccccgcaggataccagggtaaacagtttgatatggaaagataccaatacaatccgctgggacaattatgccaggccatttcctgcgatcacatgctttttgaaaataagtccgagaaaaaatgtagcagcatgacggtatcactagaatacgatgattgggggcataacagtcgcctgcggtacagtgatggcacgtcagtaaaaaatacgtttgatccgataaagatgaccagtgagcatcagcgggtgtcgaacgatgaaagccaatcttccggtatcatccgcacgacatacaaccagtttggccagataacagcgacggagcgattgacaacaagcaggattcaacaagggtgttggcactatttaagagacgaactggggcgactggtttccatcaacgcaaacgggaataccacattattagcgtacgacgcatttgatcgtgtgattaaacagacgttcgccgatggcacgacaatcagtatggcatacgaaaatggggtgtcagtcagaatgtccgccaccccgctgggaatcaatcaaacaccagtaatcctcggaacacagatccttgatggtttgggacgggtcattgatatggagagtggcggtcgtaaaataaagctagattatgagggcgcttctccggttcctgatacagtcacttatgttaagggaccaacctctggtgataaagatatcgtccttcattatgaatacgagccaaaattgaataatgccgtcaccaaaatcaccgcaggacaggacgatgtggaccaaacctttaagtatgatcccaaaacgggtttgttgacagaagccattgaagaatacaaaaataaaaacgatgaaatgattagctccaagctcatttttgactatacactgtcgggacaattagccagcgagaagctggttagttataacaaaaataatagagcgtatatgcattttaaaacatgctattccttttcttttgccaatagaccaaccgcgataaaatcaacaattaatggtccacgatatatcataaataaatactcctatgataatcagggcaggctggaaacggtacgcaataatgacatagagatcaatcttaagtacgataaactgagtcgccatgtttgtcagtcaacagagtacctatttgatactatcaataacaaaatcacgacatctctgacattagatgattttggtcgggaaacaaaacggactataagaagacataatggtttaaaaaataataaaggaataacggatattcacataagtcagacattcaatgaacaggacaaaattacaaacaaagaactattgcacggtacaaaacaaatcagtaaggaagtctatacataccacaaacggggcggactggaaacgtataccttgatggagctggtgggagaaagagagataacgcaatgctctgattataaatatgatcaccttggaaatataacacaacactccataaccacggagggcaagaccatcacttcgacctatacatacggaaatggcaatatccaagatccctgtcagttaatagacgtcagcacctgtaccggtaacaattcaagttcttccttgcggtttacatataaccaaaggggggcgttagtgtgcgaaaatgacgaaaataacacgaagatccgcacatggacttatgacagccttgggcgtatcgacactacggttgatgcccttcataaggttgaaacccgctatttatttgatgctacgaatagactcattatcaaaagatctgaaaaaaatggtacaccttatcatcatgatttgagttattgttcaaatagcttggtacacgataattatttctatggtgaaaaaagagacaatgcagcagaccgcaaatacaataaagtaggtgggatttgtttagggttttcacaaaccccctgccatcaaaccccaacctccgttgctagtcgctatacagaaactgccacggacggcaagggcagcgtcatcgcgacgtttcagggcgaagacgtacagcatattgcctattcgccttggggggtgacaaccgagcaggcaatggttacggctggtcaacagccgccgcacaacacggcgatcgaagagcctcgatttaacggtgaacagtgggataccgccagcgccagttacttgctgggcaacggctaccgggcctaccgccccgacctcatgcggtttaccgccccagatagctggagtccctttggggccgggggaatcaatgcctacgcctattgcgggggcgatccggttaatctgaatgacccaagtggacatattagcgggtggggatgggcaaatattattactggtgggattggtctcttgttggctccgttcacatatggaggatcattagaattagggctgggagttaatgcagcacgggggttaactgcattagacgcagctagtggtgtaactgcaattgcttcaggagcgttggaaaataaaaatccagaaacatcgagaagactaggatggatgtcgctaggattgggactacctagtatggtgatagggggttattctttagcacaatgggttaatgttaggttaacaaacagttttaggacaccttatcattatcccacaagtttaggagaagtaaatctgtctagaaagagttctgattgggtaaacgcacgtagaagtttaaactctggcgaaaattggcactcagaggtcggtctcaatggcagaactatttgggggtctgatacgaagatacgaggattggatataaaatatcctttagaacaaatatcaagaagaccgagtaatggtgatatagttcttttgtcgggtagccatggtgtgcaaaatggagataattggctcatcaatggatcacgtagaggtagtttacttcattttccattctttaaatcggatatgacggtgtatggaggatcgtggaagggacgaacggttcatgtaagaaatcttgcgacaatgagtgaaattgattttggtactttattaaataatggaaatagtcatattattttggggtactgttatggacgaaatgaccaagcattaagatatcatagaaatttactgtcggttacgagttatatacacaattaacttgtaacgcgattttagcagagttgcagcaaggcatgcgattcagaagccggggacttccacctaagttgagtgatgcggaaggagaccataaaaatctatggtcgccctcgtttttgcaacactcattttgatgtatggttggcttgcttaaatctatccggcgtcactataggcaaggatgcctgcgccccaatgagttccattgaacgtaaagtgtatcgcaataaccatcaggcatatcacaaatactaatccatgcaggatgctttttacaccaattttcagcatgtagagatgcttgtgaaactgaatatctttcggtagtcataatcattcctctttattattcatagttttttcaatgcaggaacattgctacgctttattaattcaccgaactctaaattctttttatttattactctaaacatatccatagctttcattatattcttctcttcagtttttttgctatagaatgacataaatctatcaataaaaattttgctgagagcataaaaaaccgtgggacatttatgcagcaatcttttctgtccaagaatgctccgtttcgtcacctaattttatgcccgggtaccaatgctcaaattgggttttcaaatcatcattcagtacggctgtacgggtctggattaaataatgcgcactttgctgactccattgcatctgctgctttttcaccatccgtttagcaatcacttcattgatcgtcgattcaacaaatgaagtggaaatgggttcaccatagcagtacatttcaccgtaattcgggatcatcatgctgttattttcgatataggtgtacatctcatcgacatgttttgacaaggatttcttattatcataatgcgagatgtcctcagagagcataaaaatgtgtggggcacttgagttgtttggctgtaaaatagataattcaaccggattatgacctatgaatacttataccgttaagtggctctcctccagtcaaccctctggtttggcgacgctttaggctgccaggtgaaacttctttaactgtttggccgcataagtgccccacagatttttatggtctccatactaggtctatacagaccattagccactcaacagaagttattgactccttcaaagataagagcacagataaatttttttgcgttcttcgtcttgtcttagtgaaaggcgggatgctaacaggcaattgtttattgtaactcttaaagatgataacaagagtgatgatttctatacccgttatccttcaagttgcctctttgttggctgcactcgctcacctcggtcacatagttacctatgctcccggggattcactcccttgccgtcgcgatgcatcttgaaatccatagggtatatattgtgccatttgctgaatgggttgtcagaagggaaagagtgaaataccttgtttctcctgaaaatcaatatccagaatttggcgataatattagcttcattatgaaacacattgagtctgttgttaaaattttcattgataattacaaaataacgactacccattaaattattatataatagggatagcgatctaactgtattgtaagggcagcataatgatggggactgtttggcccttattctttactcacagcgatagcagtttacttttccattgttcaataatttctctcttttctttcagatagtggtagcgatcaggcagttataacagtcagaatgcttggttgaaacgccgggtttttgtgattctgcaatctaattgctcatttttgaactagtcccccatttctccatcttaatggtgtagaattagctactgagaccgatatactggacgtttttatttgtacatattcgtatttattgaatacgaattaattataatatattgtttttaagtgaaaaaaatcaaatacatttatttggtaaatgtttaagaaacaaaaggtggattttgtggaatacttatctctttacgggttgtttttagccaaagtagttacgctggtgttggcgattattgctctggcaatattgggtatcggcataggaatgcggaaatcttcgctaaaaggagaattgaaactcgtcgatctcggtgagtcatatcgggataaacagcgtcaaatgcagcgggcgcgcatgacagaagcggaagggaaaatctggcagaaagagtttaataagcaacaaaagctcgaatccaagcagaagaagagtgacgctaagacaggtcataaagggttacagaaaccttgtctttatgtactggattttaaagggagtatggatgcacacgaagtcgattcattacgtgaagagattagcgcgattctggccgtggcagatgcaaaagatgaagtgttgttacgtctggaaagtccaggtggcatggtgcatggctatggattggcggcctctcagcttgcccgtttgcgtcagaaaggtattcgcttgactatcgtcgtagataaagttgctgccagtgggggctatatgatggcttgtgttgctgatcgtgtagttgctgcaccttttgccattattggttctattggcgtggtcgctcagattccgaacattcataagctattgaagaaaaatgatattgatgtggaactccatacggctggtgaatataaacgtacactgactgtgttgggagaaaatacagagcagggccggaaaaagtttcaggaagatctgaatcagactcacgaactattcaaatcgtttattcatacacatcgcccatcacttgacgtggaaagtgtggcgacgggcgaatattggtacggctcacaggcgaaagagaagggattgattgacgaaattggtgtcagcgatgatctgttgattgctcaaatagataactgtgaagttattggtgtcagttatacacgccgtaaacgcatggtagagcgtttcaccggcaatgcaatggaaagtattgataaactgttattgcgctggtggcaaagaggggagaagcctctgctttaattaaatccgctattttggatcaattatcttggcgtataccctattgatttcaagatgcttcgcggcggcaagggagcgaatccccgggagcatagataactatgtgaccggggtgagggagtgcagccaacaaagaggcaacttgaaagatgacgggtatatcctaaggcgttctatttcgacgctcagggacgcctcgatatattgcttaattgtgatgtgctaattgaacagagcaacgcttattctcatgatgttattccactgaaaaacctgctattttggccctgttaaaatattacaggtgttacataatttgctttacatccctcttcctgcttgtgatgagccgcaggcttttctacaccaatagttgatactctggctttgcgtttatctgttctgcttagctgatcttcaaacaaatccaagtcacttttgcacagcgctattggcgtttttaaacgcattatgcaaatcctcgaagaacggcaacttacaataatattcataaggaaataaagtattatggctatttcacaatacgatattcataccagtcatgctgttatctctgttgctgatacgggaggtgatgggttaccggtcctccttatacacggtaattcaagttgtaaagaagtttttcgccatcaaattaactgttttggtgacgaatatcggattttagctattgatttacccggacacggtgcttcatcaaatgcagtggatcctcgccggacctattcgatatctggctatgccctttgcatcatcgaagtactggaaaaattagccatcgataaagttgctgttttcggatggtcactggggggacatatcggtttagagctgatcccaagattcccagggattgttgggctaatgatttgtggcacgccgccggttagcccaggtgcagaaaatgtcagccttggatttaaaccaagccggtttatggcaatatcgggtaaggcttcgctgacagaagaggagattacggattataccttggcgttgtatggtgaaaacgcgctttgtgagccatttttgagagccgcagtggcgcggaccgatggtttggcccggcaatatatgtctgaagcatcggtttcaccagacgttatggaccaacggttattggttgaaacaaacccaacaccactggctatcgtcaatggtgtagaagatttattcgttaatattgattatattaacgggataacctacaaaaatctctggactggtcaggtgtataacttgctcaacttgggacatgggccattctgggaagcgccagagctgtttaaccgtttgatggcgggttttttctctgatctcaccttagaagtgtaattaatacttgtagttataccggcagatatatttttatacccgtcatctttcaagttgcctctttgttggctgcgctcgctcaccccggtcacatagttatctatgctcccggggattcactcccttgccgtcgcgatgcatcttgaaatctatgaaggtatatattgttttcatatatctgcctattcgttgctcaataaatttttgttattaattttcgagataatattgtttcggtaggataggcgtcaggtgtttgaacatattgaaaatagccgtactttttactgtgggtaaatcattttcccttagagaaaattcaccattaatactaatacatctcctttttgttctacgctacttatatacatgccatgaataaaactttcacgttggcggataatatcactagctctttttagtcattgttcacctttaatcagtgttgttctgtttctactatttctatccttaatcaaaaataatttgttgcgcatcattttttatcaggtagagtgtgaacttttcatcatgcagatggaagattttgtttacggtgatcacttcattcatttgcgtagatcatgggcggtatctaaaataccttagataattcaatatgtttcgagtttggcggaatcaactgaataaaaataagttgatatattgagaatctatcgcaatataaaaagaggttttaaataccgtgatatggcgcagtgaattccaccatctgaaaagataattaggtaaagataactatgggtaaagctcttgtaatagtggagtccccggcaaaggccaaaacaatcaacaagtatttgggaagtgactacgtggtgaaatccagcgttggtcatatccgtgatttgccgaccagtggctcagccagccaaaagagttcgagctcatctaccgataagtctaagaagaaggttaaaaaagatgagaaagctgtattagtcaaccgcatgggggttgatccataccgtggttgggaagcgaattatcagattttgccgggcaaagagaaggtcgtggcagagctgaaatcactggctgaaaaagttgatcatgtttatctcgcaacggatcttgaccgcgagggagaagccattgcatggcacttgcgggaagtgattggtggtgatggcgatcgttttagccgggttgtttttaatgaaatcactaaaaatgccatcaaacaggcatttgataatccgggtgaattaaatattcaccggataaatgctcaacaagctcgccgttttatggatcgagttgtggggtatatggtttctccgctactgtggaaaaaggttgccagagggctctctgccggccgtgtgcaatcagtggcggtacgccttgtggtagaaagagagcgtgaaattaaagcgtttgtaccggtagaatattggcaattacatgctgatttgctggcgaaaggcgaaatctcgctgcatatggaagtgacccatcagcagggtaaaccatttaagccggttaatagtgaacaaactcaagccgccgtctctttactggaaaaagcccgttacaaagtgcttgatcgtgaagatcgcccaacatccagtaaaccgagtgcgccgtttatcacatctacattgcaacaggcagccagcacgcgtttagggtttggtgttaaaaagaccatgatgatggctcagcgtttgtatgaggctggatatattacttatatgcgtactgattcaactaacttgagtcaggatgcgctggatatggttcgtgattatatcagtgataattttggcgataaatacctgccagaagcagccaatacttacagcagcaaagagaattcacaggaagcgcatgaagcgattcgtccttccagtgttgatatcgtggcagagcaactgaaagatatggatgtggatgcacagaagctgtatcagctaatctggcgtcagtttgtggcttgtcagatgacaccggcgaaatacgattccacaacattgacggtacaggcgggtgattttgagttgcgggccaaaggtcgtacattgcgttttgatggctggacaaaagtgatgcctgtgttgcgcaaaggtgatgaagaccacacgttgccggttgttgaaattggtacagaacttgatttgcaacaactgatcccaagccagcacttcaccaaaccaccggcacgttacagtgaggcatccttggttaaggagctggagaaacgcagtattggtcgcccatccacttatgcttccattatctccacgattcaggagcgtggttatgttcgcgtagagagccgccgtttctactcggagaaaatgggagagattgttactgatcgtctggaagaaaatttcaacgagctgatgagttatgattttactgcgcgaatggaagatcagcttgatcaggttgcaagtaacaaagtcgaatggaaaggggttctggatgagtttttcacggattttagtgaacagctagacgtcgccaataaagagccggaagagggcggcatgcggcctaatccgatggttattacctctattgagtgcccgacatgtcagcgctctatgggcattcgaacggcaaccaccggcgttttcttgggttgttctggttatgcgttatcacctaaagagcgttgtaagcagacgataaaccttattcctgaaaatgaaattcttaatgtcttggaaggggatgaggcggaaacaaatgcattgcgcgcccgtcgtcgctgtaaaaaatgtggtacagcgatggacagttaccttattgatagccaacgtaagttacatgtttgtggtaataacccggcttgtgatagctacgaagtggaagagggcgaatttcgcattaagggatatgacggcccagttatcgaatgtgataaatgtggcgctgaaatgcacctgaaaatggggcgtttcggtaaatacatgggctgcaccaatgaaacttgtaaaaatacccgcaaaatcttgcgtagtggggaagtcgcgccgccaaaagaggatccggttccgctaccagagcttccttgtgaaaaatctgatgcctattttgtattgcgtgatggtgcagccggtgtatttttagcagcaaacactttccctaaatcaagagaaaccagagcgccgttggtagaagagttagctcgttttaaagagcgtttgccggagaaattacgctatctggctgatgcgcctgtggtggatgctgaaggtaataaaacagttattcgttttagccgtaagactaaacagcaatatgcttcttcagagaaaaatggcaaagcaacggggtggagtgtgttttatgttgatggaaaatgggttgagaaagacaaaaagtaacaatttctgacagaatcaacactctctttttctcagaaaagggattattttcttctattaagccaaccttataggttggcttttttcgcctattggcattatcttaaaatatatgaattagaatccggttaaacattcattatgaatttttaattattcgttatataaatatgtaatcgtgttatagtggttatatgcgacaacaatattatttctattcgttataataaatagcaaacagcaatatcagtccaggtttctaagccataattgttcacagcgtttattttgggatggtgtttatatgaaattgcaacagcttcgttacatcgtggaggtggtaaaccacaaccttaatgtttcatctacggcagaaggactgtatacatctcaacccgggatcagtaagcaggttagaatgcttgaagatgaattaggcattcagattttttcccgtagtggtaaacacctgacgcatgttactcccgcaggtgaagaggttgtccgaatttctcgtgaagtattatctaaggttgatgcaatacggtcagttgctagtgaacatacttatccgaatcgtggttcgctatatattgctactacccacacacaggcccgttatgcattacctcctgtgattaaaggttttattgaacgttatccgcaggtctctttacacatgcatcaggggtcgccaacgcaaattgctgaagctgtgagtaaaggtagtgctgattttgctattgcaactgaggcactgcatttatatgaagatttgataatgttgccttgttaccattggaacaggacgctggtggtgacgtcggatcacccgctggcaggtaaagagagtgtttcaattgaagaattggctgaatatcaactggtcacttatacgtttggctttaccggtcgttctgagttagatgtcgcattcgataaagtgggcttaaagcctaaaattgttttcactgcgacggatgctgatgttattaaaacttatgtccggttaggattaggtgtaggggttattgccaacatggcggttgatccggtgcaggataacgacctggtttgcattgatatgcgtgataaatttagctacagcacaactaagattggttttcgtcgcagtagtttcttgcgcagctacatgtatgattttatgtggcgttttgcgcctcacctgacgcgtgatgttattgatcaggcagttgctttacgctcaaatgaagatatcgaagtcatgttcaaagatatcaaattaccaatcgtataatgaaatatacccaatggatttcaagatggatcgcgacggcaagggagtgaatccccgggagcataggtaactctgtgaccggggtgagcgagtgccgccaacaaagaggcaacttgaaagataacggatataattagggagctaatgattgccattggctccctaattttgcttatcagatggggtcaaattcaccactgaagaaatcatcagactcttctattgatgtttttctttgtttgttgatgaaattatcaaaactggctttaatctcaggattttcgagcgcctcatagtctaaaaccgatattaaggatgaatactcaaaatcaatattgatattttcattagaagcacagcttgataaaaagtttgaattagtgctatcaaagttaactcgatagagttttagttttggaatatatacggtcttctctcctacaatcaaggtatcgatagcaatcgttagtgtcacagtagaatagaagcctttatttttccgaatacctaaacgaatcgtttccccttgcttggtcagaaacttagcgaaatctggcagcatatctgtattttcgaatacaaccacattcataatgaaattaaggaaactttttgaaatgcttaaaccatttaatgaatcggtgtaatttttagattcaactttgctagtacccattagaggtagtttgttaacgactttagtccaaaagtccatatctgttttatattgctctccatacttttccgcgtatttattgacataattggttgcgatggaggagagtgcaattaatgtttgacttaagctattagttttgtctataacttctggtttatcagataattgtttggctataatgaactgaactaaaccatctttttcattgtatttattggtattttctatactaaaataagcatcgtcgatgtgaaagaacgtattagcttcattgatttttgcgatatgtttctgattattcgtaattgtgttttttatatccattattttgtccttgtttttttattgataatttgaatccaattgaattgttagcgagttaattctagctgattatcattcgattgtttacccggctaaattatcaaaatttattactgaaattctgatagatacactgaattgacgcattgtgcggtgatgagaaaaaaatatttgcttatatgttatgtttaatttgtgccattatcattaaggtggttttgagttatgccagtataagaagaaggaggagttatgtcgtttgatttaaaaaaagtttgtgtttcaacactttccgctgcaagtaaacaatatgattattacagcttaccactggttgctaaacatttgggtgatatttcccgtttgcccaaatcactgaaagttcttctggaaaatcttcttcgcaatatcgatggcaattctgttgttgttgatgatttgaaagcaattgttgattggcaaaatactggtcatgcagacagagaaattgcttaccggccagcacgtgtattaatgcaggatttcaccggggtgcctgccgttgttgatttagcggccatgagagaagcggttcagcgccttggtggtaatgttgaacaagttaatccactatcacccgttgatttggttattgaccattcagttatggtggataaatttggcacggaaaaagcctttgaacaaaatgttcaattagaaatggaacgtaattacgagcgttatctctttctgcgttgggggcaaaaagcttttaaccgttttcgtgttgtcccgcccggaaccgggatttgccatcaggtaaacctggaatacctgggtaaaacggtttggcatgaaatgcataacggacgagagttggcttatcctgataccttggttggtaccgattctcataccaccatgatcaatggtctcggtgttctaggatggggtgtgggcggtattgaagctgaagcggccatgttaggacaacctgtttccatgcttattcctgatgtggtgggttttaaacttaccggtaaattacgcgaaggaattactgcaacagaccttgtattgacagtgactcagatgctgcgtgcccatggtgtggtcgggaaatttgttgaattttatggagatgggttagctgatttgccgctggcagacagggcaaccattgccaatatgtcaccggaatatggtgcaacttgcggtttcttcccggcagatggtattaccctgagctatatgcgattgacagggcgtacagaacagcagattgagctggtagaagcttattgtaagatccaaggattatggcgaaatcccggtgatgaaccggtatttaccagtagtcttgaactggacatgtcgacggtggaagcgagcctcgctggaccgaaacgtccacaagacagggtggctttagcgcgagtacctcaagtatttcaatcatccgttgatctagaaatgaataaatcccaggggaaagccatctcagcgccagttaatctggataaccagaagtatgagttagaagagggggctgttgtcattgctgcaattacttcttgtaccaacacatctaatcccagcgtactaatggctgcggggttgttggcgaaaaaagcggttgagaaggggcttaaacgccaaccgtgggtgaaaacctcactggcgcccggctcgaaagtggtgacagattaccttgaattggcgggcttgatgccttatctggaggaactgggcttcaatctggtgggttacggttgcacaacttgcattggtaactctgggccattacctgaatctattgaaacggcgattaagcaagctgatcttaccgtcggtgccgtcctttctggcaaccgaaactttgaaggccgtatccatcctctgataaaaactaactggctagcgtcgccgccgttagttgtggcatatgctttatccggcaacatgaaaaaggatttgactaaagatcctcttggtcaggatcaacaaggcaatgatgtctatttgaaggatatatggcctgatagcaaagaaattgctaaagctgttgagcaaattaaggcggatatgtttcacaaagagtatgcggaagtctttgatggtgatgaaacatggcaatcgctggatgttgcgagttctgcaacttatcacttccagcttgattctacttatattcgccacccgccattctttagtgagatgaccgcagaaccagaagcgataacggatattcacggcgcgaatatattggctattcttggggattctgtcaccacagaccatatttctccggcggggaatatcaaagctgacagtccggcagggcgttatcttcaagaacatggcgttgaacctaaagattttaactcctacggttcaaggcgcggtaatcatgaagtcatgatgcgtggaacgtttgccaatatccgtatccgtaatgagatgattgctggtgtggaaggaggatatacccgccatattccgtcacagacacaattagcgatttatgatgcggctatgcgttatcaggaagaaaaaaccccattggctatcattgcgggcaaagaatatggttccggttcgagccgcgactgggcagcgaaggggactcggttattgggcgttagagtggtgattgcggaatcatttgagcgtattcaccgttcgaacctgattggtatgggcgtattaccattggaatttcctcaaggcgtaaatcgtaagacattaaatctgcaaggtgatgagacaattgatattgaagggatgaataacctcaagccgggacaaattgtaccggtgaaaatgacttattcggatgggcatcaggagatcattaatgctcagtgtcgtattgataccaaaactgaattagattatttccaccacggtggtatcttgcactatgttattcgtcacatgttgaaataatttttatccccgttatctttcaagttgtctctttgttggctgcactcccttgccgtcgcgatgcagcttgaaatccatagggtatacatcatactaaagacggcgctgatttatttgagcgccgtcttttcagctagcttactgaaaaactaattttgctcagataacaaatgacccatttttctggctttagtatccaaataataagcattcttaggatttcggccggtaattaatggaacacgttctacgatattaatccctgcttcggtcataatttccacttttttgggattatttgtcagcagacgaatagcttgaataccgagtaatttatacatatctgcacataaggtgaaatcacgctcatcggcggcaaaacctaactgatggttagcttctacagtatcgataccgttatcctgtaacgcgtaagcacgaattttgttgattaagccaatattacgaccttcttgccgatggtaaagtaatacacctcgcccttctttagcaatttgagcaagggcggcttcaagttgaaaaccgcaatcacaacgcagactaaacagggcgtcaccggtcagacattctgaatggatcctggaaagcacaggttcattgccagaaatagtaccgtatactaatgcgacatgatcttgacctgtggcgatttcttcaaagccgaccattaaaaaatcaccccaaggagtgggtaacttggcctcagcgactcgttttaattgcattttattgttcatatgttgattcagactcgttacaagacattcgttacaaagcatagatgtgaaaaacaataccggtctgggaaatcagcggacactgcgtaaaagattttctctgattataatgtggctatattttgccatatttaccgcaaattatctgtcaaaaactttcaaataattatatctacaattgtgatggtatgatggtatggtctgattagcagaatggcattaggtatgcactggtcgcaggacattatcacatcaacgttaattagtgcagtattagtgatggctatctgttatctcacagaaaaatggcggttgattaacgacaaaaaggatttggtggtgtaattgcttcttatttacacttaatcgatgggaagatatcgtaaaagagctgaaagacgcatttatcatgataaattgcttcctttatccagactggaaatgctaatttaatgagccgttatccagcataatgtccaagcaacaatagataacaggaaaaaatgtgaaatattttctgattttattactgatattggtgatctttgtcatctcgatgactcttggatcaaataacgatcaggtcgttacatttaactatctgattgctaaagggaattactctatatctacacttttagctgtattatttgctagcggtttcgtgttaggttgggttatctgtggattattttatcttcgtgttcgtttgtcattaggaagagctgaacgcaagattaagcgacttgaagtgcaactggagcaacctgctgaaccttcggttactgattcatcgcttgcacttagcaaggaataaactcctatgttagagctgttgtttctgttgcttcctgtggccgctgcttatggctggtatatggggcgcagaagtgctcaacaggataagcaacaaaatgctgatcgcttatcacgagaatatgttgccggggttaactttctcctttcaaaccagcaagataaagccgtggatctgtttcttgaaatgctcaaagaggacagttctgcttttgaagcacatttgactttggggaatctattccgttccagaggagaagtagagcgggctatccgcattcatcaatctctcatggaaagcgcttctctgacatttgatcagcgtttgcttgcgacgcaacaattgggccgcgattatatgtctgcgggtctgtatgatcgtgctgaaaatatgtttgctcaattggtgaatgaaaaagattttcaggaaaatgcgtttcagtcgctgctgactatttatcaatcaaccagtgattggaaaaaagccattgatattgctgagaaattagttaaatccggcaagcatgatttacgggaaaaaattgcgcatttttattgtgaactcgctttacaggagatgagcggtgatgatcttgatgaagctatcggttatctcaataaagcggttcaggcagataaaaactgcgccagagtttctatcatgttggggcgcttgtttatggcccggcaagagtacaataaagcggcggatgctttaaaatctgttcttgagcaggataaacagttggtgagtgaggtgctacctattctccaagagtgttaccagcatcaaaatcagattgatgaatgggaaaatttcctgaaacgttgtgtcgaggaagattgtggagccacggccgagcttttgctggctgatattatcgagcagcaaaaagggcatgaagtcgcgcaaacttacatcaatcatcgattagagcgtcatccgaccatgcgcctattttatcgcttgatggattaccacctggccgaagcagaagagggtcgggcgaaagaaagtattatcttgctacgggacatggttggtgagcaaattcgcaccaagcctaattatcgctgccataagtgcggctttacttctcattcgctttactggcactgtccatcatgccgttcgtgggattctattaaaccgatccgtggattagatggtcagtgacagtgtcaccataatattgctttgttagtcaaaaaggttaaaaaatgacatctcataccttaacatcgttcggtagacagattagctcgcctgtcattgttgctttagattacgacaatcaggatacggcgctggcttttgccgataaaattgatccacaggattgccgtctgaaagtaggtaaagagatgtttaccttacatggtccgcagtttgttaagttgctgcaccaacgtggttttgaagtatttctagatttgaaattccatgatattcctaataccaccgccagagcggtagctgccgctgctgagatgggggtttggatggtaaacgtacatgctagtggcggcaccagaatgatgacagcggcgaaagaggcgctgctgccttatggtcatgatgctccattgttaattgctgtcacggtattaaccagcatggaacaatcggatctgcaaggtattgggattgatatgacaccagcgcaacaggctgaaaggttggcaaaactgactcaggcatgtgggctggatggtgtggtttgttctgcacatgaagctcagcaactgaaaaaggtttgtggtcagcattttcaattagttactcccggaattcgcccgacgggcagtgatgtgggtgatcagcgccgtatcatgacgccagaacaggcggtattggctggcgttgattatatggtcattggccgtccgattacccgtgccgccgatcctgcggccgcattgcgtcaaattaatcaatctattgcgggagtgattaatgcaagataataattcgcggttggtctattccacagacagagggcgtattcaggaagaaacggttgaatctcagcgtccaaaaggggatggcattgttcgtattcagcgtcaaaccagtggccgtaaaggaaaaggggtttgcgtgattaccgggattgatgctgatgatcagacgttagctaagctggcggctgagttgaagaaaaaatgtggctgtggtggttcagtgaaagagggtgagatcgaaattcagggcgataaaagagaattattgaaacagttactcgaagccaagggtatgacagttaaattagctggtggttgatatacccgttatctttcaagtccatagggtatagaagggcggatattcgcccttcattcattttactccagagtctaattattggtagtattttaaggtatttgttaataatattcttaatcattttaattagaaataactcacaataaagagataaaatatattattgttaatattctatgaaaataatattttgatattattttttcctcttaaggatagtaatataattaatattatttcttcatttctctgataagatcattattaaaaggcattttcgtatgggaatgagcaactttgatgataaaggcgatgaacattaataattactttttaaatcatagagataacaatttaaatctattttttcagtaaagaggttgactatggagaatgatcgttctaccatgaaaaacatggaaggtgagcaggcgcccaacatcagggaaaacatgttggatgttgtagaggaattaatttacacaagggggattgcggcgacgggtatcgatctgataacgcgcacgacaggttcttcacgtaagacaatttatcgttattttggtacgaaagaggggttgattgaagaagttcttcgtcggcgagatgaacgatggatgcgggggtttacctcatcaatagctgaatataaaacacctaaagagaaattgctgaatatttttttggtattacaaagatggttcgcgagtgatgattttagaggatgtgcatttatcaatacatccggtgagcgccctaatcctgatgatccggtaagaataattgctaaggaacataaagagaaagtttttacttacgtgctgtctatttgtaaagaaatatcgccggattcatcagtggatttagcgaggaagctcctgctcttaatagaaggcgctattacaactgcgcatgtgatgaatgatacacattatgctttagaggcgatgaatattgccgaggcattgctgagtaaatacgatgtgaattaatggaaaatttaattaggagacaatatgtctaatacaaaagaaattcgccagccggtgccaccatttacccgcgaaactgctattcagaaagtccgtttagcggaagatggatggaatagccgtgatcctgagaaggtttcattggcctattcgttggatacccattggcgtaatcgtgctgaatttgtgcatagccgtaaagcagcacaggatttattaaccagaaaatgggcaaaagagcatgaatatcgcttaattaaagaactttgggcgtttactgataatagaatagcggttcgttatgcttatgaatggcatgatgattccggtaactggtttcgctcatatggtaatgagaattgggaatttaacgaagatggcttgatgtacaaccgttatgcctgcattaatgatcttccgataaaagaatctgagcgcaaatttcattggcctttaggtcgccgccctgatgatcatccaggattatctgagttagggttgtaatccttttcaggcgctggtcgagacgcggccaatgcgcttgtactccctgccgagggccttctgattaacagaagagttcagaaggctcatactttgaatttatcgtttgaggtaggacagatttcggttaatgcagtccgtgacctgatgaagttcgttagtgggaatatcatcagtgacatcccgtgcagtatgagcgaagttggcggcgacatccgctacttcatcaatgatattgttcattctggccggcgcgatgcctgcatctttggcaactttcaacaacatggtgcgggtgatatcggttccgtagccggtcaccgaagtctgatgctgtccgccggggccatccgcaaaggttagatcataggcgggggacactacccactcattgctcttattcaaaatgaaggagaaattcttcacatgatcatcacgattatgcatcaacacgttgaacaccatacgccggacctgggtttctcgcgcaacaacagagcgcgtgatggagcccgtcgcccgtaagatatctatgtaatccatacagggtaatcgaaagtcggcatgtagggcgccggccatactcagtaccggcacccgcattccattctcacgatcgaaacgctggacaccgaaagcagcaagctcccctccaaggcggaaatagcgacttgtggggaaatcaatgcccgctattctggcagtacaggcatatgcttcttcaagggcacagacccaaggattctcctctgctgcggggaatttgaccaaccaaggttcactttctgggaatgcagttgttttcatctggccggtggatggattgtattctacctgtgctttgggtctggctccgtgaggcgagccgccaagcaggaaaagttcacgcagtgcctccgaatcctgaccggtgacttcctgacggatctgctgagccagtccagtcaagttcagaatactgtatttgtcttcctgatcctccggtaaaggcagaacaggttggtaggtcagagcccccatcgtgttatcgctcagcaatgccaggcgttccaggacggaaatccggccgggatcgacatgattacggcgcaggaaccggtccataagcagccgtccccagccatccggcagggaatctgcgatgaaaccaggaagccagtcctgaaagtgctcaaaattcgcgtaagtctctgtagaaagtggcagttgtaggggcgagaattcgataccattatcaagagcttcatgggtgtactcaaataaatagcggccactcacagtactttcggccagatgacctaacacccactgttctcctcgcccgcggtagatcacttgtagtcggcccagtgaccggtattgaaagttttgggtcgtcatttttttgcgtctcctgattgatgagcgcggccattgcctgagggtttccgagacgaacgttgggttcgtcgggcgcgctggcgaactggtgctttcatggcttcaagctgtgcaatgctagtcggttgtagcataaacagggacttaattgcgttctccagccgcagagcaaagacgaccttcatgaaattctcaagcgtgccccgcccgctgccttcaagttttttgagcgcagagacggaaataccgctcctgagcgctagctctgtttggagcatgttacgccgtaaccggtgctcacggaggcggtgcccaagttctgctagcaattccgattcggtataaagtattagagccatgaatacacctattaagtttaaattttatagttaagagtctttattatacctcttattttaccaaaatctgatatgaaagtagaagagtttaagagctctatttgaagcttataatggtatttaagatactttaaagttttatataagtcttttataaaataaatcttccgtttcaaacagttcatgaatctggtttattcgtgttggtttctttaaggatttactgtcatacttacctatacatcaaattttaaaatgtgaggtaacatggaaaaacatccggtagaacaatcacctaaacttgatttctcaaatttagattttgttaaattcggggaatacctcagtgaatataatattgttgataaacaaggaagataccttcattggagccagcttaagtggcgagttcctggtaaagaagctgaacacatctggtatgcggtaaagttctgtagagatcagttgaaaaaaagtacgggcttatttgataaaagtgggaatgaatttagtttttgtatacatgattcactagaaccaaagttgcacaaaattgtacaacttggtgccggtaaagtcgccgcacttgcaggatctcaagcatcagataatattcaacagaattacttagtatcatctttactgatggaagaagccatcaccagcgctcaattggaaggtgcagcaactacccgagctgatgcaaaaaaaatgctagaggaagaattagcgcccagcactcctgatgagagaatgattctgaataattatatgctattaaagctagcggataaaagaaaacaagaaccccttacaagggatctaatgcttgaatttcacagaatagcgactaatggtgtatctgaaaatgaaaatataccggaggaatttagatgcagtaatgatatctacattggaaatgatgacaatccattattttacccgccaaactatgaggagttagaaaataggttagaagaattatgtacttttgctaacgaaaatcataatggagaggatggcaggaggtttataccaccagtaataaaagcgattattcttcactttatgatgggatatgaacacgcatttaaagacgggaatggcagaactgcaagggcaatattttattggtatatgctaaagaatggatatgatatttttgaatatatttcaataagcaaggttatcaaagagcaggctaaagagtatggtatgtcatatctttatgttcagaaggattatggagatttaacttattttatcgattttaacgttaatattattctaaacgcatttgatgaattacaagagtatttaaaagtaaagacaaaagaattttatgaaattgtcgatgtgttggaaaattcaaagtataaaagtaagctaaccttcattcagaaagatttaattaaaaaaggtgtaaaagaacctggaagattgtttaaagttaaatcggttcaaaatgtatatgatgttagtgaaaatacagctagaaaattacttagagagcttgaggcaatgaatatattttttcctataaaaataagacgaacaacttattatattgcccccgcagatctacgtagtaggctaaataagatatcaaaatcgtaggcagaattagtgcagtttaaaataaataaggcgagaaaatatttctcgccttatttattagtgtttcaagtaatacaaagagaacttttaattatccataagtaggaaaggggcgataccaacaattttttctgttatgagattataatgcagatttactgcaataacagaataaattattgctccgtcgggcgtgagagtcgccgaacgttttgaacgagaaagaaccaccgttggttgtagtttgggttcataaccaccgccaaggccggtatcatgtactgatttcatatttattctgttcaattcttcacgacaggcaacaaaggttatttcatcatattttgccatcctttcgttggttttcagcagcgtaaaaatatcggacaattttttacgattccccgcttccgggctgactaatagtgcgtcatatttattgatattcgtactgtctgtcctatttttccatactgccgctttcacttcctcatcaggcattttctcataatatttgataccgtaatttcttaccctaccatgattaactgtattggcttctactccagtggctagcagataattttcaatatcattggtagccatattctgaatatcgttcacggtaaacgtcttatcacctattcttacattagccagacttgctgtgttgcctgctttaattgttgcataaggttgtacagtcaagccgctattacctaatgtaacatcaaagggagaatttaatggattttccggtgattccaataatgtctgaccgtggggaccaagaaattgaatcgtttttcccgcagggacttgcgtcattgcactatcagagaaaaaatatccatgtgaactcagcattaatctattcgccggttcattaggtactgtccataattcgaatgcaccaccaagctcaattttttgtggttcaagttgaggatattctttttgtaaaatctcaattctgaattgtgcttttctttttctcatatcacctgatccaatatctatatccgcccctggttttttattcgcttttcgccattccttcactctgttacggtaatcagtagctgattcatcgggcattttttcaggttttccactacccacacccatgacattgcgggatgattcatttgtgcttattctagtacttgttaatgggatttgactatctcctttaccataataaggttgaataacatactcgctttcacctttgaatatggcatattctgctctgaatctattttcagtcaataaagccgaattgttttctaataaatagccagaattactgaaatcaaataacgtatttttatcattggcgtaatattttgttcccacaatgcgtgattcttccagcaaagaaaaaccgccactgactttttgatcaattattttattatcgatagaagtaaaccatgttgggtaacgattataatagatatgtagcatctcatgatataaagcgatagcaggctcacgggaacgccaaggctcctcgacaagtttttcttctgtgccaatcaagtgattctctgggtcaaaggcaatactgctaccggcgctattatgggcataaaattgaccatttttctcgcgtacaatggcatccatcgttggtggttgtatatttaaaccctgtttttcaagctcttgaataacgatatttccggaagggatttcacttatttcatctagtacgtgagtgacttgattaataaagagatcattacctgttattgtgatcccgatagggggaatatttacgcggttactctctatggatgtgtattgtatcgttttttggatattacccgaagagtattttggcatcggtgtgttaggtatttcttcaatagctagggccattttattgattgccgatgcattaggtaattgatttccaacaggatagatttccctcaatagataaggtagttcggttttgatggcattaattttttcagccgaaatacttaggttttttggtaatagattgttttgtaatggtaagttgacttcacgtatccaagcttgttggatattcactatctctgtgttgagtagggcttgtttatctccaagttttaaagatttttccaagaaatgggttaatgtatcagtaatatctgatagtttatcgatatcatacttttcatgatttttgaatgcggtattgatatgaataaatgcatccaatattttatcgttattaatattactgcgtgctgcttcaagttcctgatctatttttttactttgctccaggataagaaatttattagatacatcggtatgagtaatccaatgtccatttttatctaatttcaccgcaggccagtaactaaattgttgcggataagctggattggctacgcgccaggtgtggtttgtttcatcccatttgacttggtaattagcaccagattcctttatatagtagttctgtttaattgcggtttccacattagcagggcgtattgaatagatccctttatatattccctcatttgcatgagctaccattcggttgagtgaaatattgctgacttgccattcatttttcagtttaccaagccctctggtgcttttgctaaaaatatcggcgaaacttttctcaagtttaatgctattttttatcacacctactgcgcttacgactcctcggtaagttaaggtcaatgttgatctaatgggcaaaggttcgattaaatcgattaatccaccgagcagaatgcgggaagattggcgtaaagtgattacgccatgctctggtaatgttcggataaccgctgtaattagagctcttccggtcagaccggcttgtctgaggcgtaatgtagtttgtgtgactttagcggccattgattcagtcaatgacatacctagggtagcaacaactaacagcacattcgcggtatcaaagataattgaaccgacatcctctcccgttaatgtatattcactatcggttgttgctttatagataacattatagaaaggaatcagaatggttgccgcgatatgccaaccagaggtaatatccagagcttgtttactttttattgcaatatcgtttaagcctttctgcactatcgttgtggtaacagaaagtaagttatcttctttataaaaattaaatttaggtgagcctgtgaaactaattccgacattcattcctgaggttataccataataatcattccaaaatgcgtcataagaatatttatatcggcttgtttctgagaagccgcttaaggttttggcccgttcatagccaatcgggaaaagtctttttcctgtacgaaccattctatttgccattaatatccccatgcctatctctattttttgctcaattaaaaatagtgcattgggtctagacatagcacgtaaggtgggctggctatcaacttgttgttgggaatattttcttgccttcactcctccttgtattgttgagacaaccaaccaattaccctgatacatttttatcatggcgacatttcccataccctgttcgactgaatagagaaaagcttcttctggtggattaacaatctcttcggtagttaattgcgcagccggagatgaaagtattaatttactaagtaaaatggattcataatcactgtatttgtttttataaacattaaattgctcattaaaattatattgtgaatcaaatttatctctctttttaaaatcgataaaagaaaagtatcctgctggctttacgttgtttttattgaaaggattaagtttttgcttgtcattttcaaataattttattgtttctaatgtagaatacttaagtgcttgttccacattggcattctcttttctcattcgataaatgattgcggctgttaaaataatacagccttccatttcaatatgttttgattcttgataaagaacatgatccgtatcatagtgaatattattttttttaaataataattcagcttgatcttgggcaaaaattatatcgcgataatcaccatgaccttgagtcatttttccgattttaggagcaatctgatataatagggcacctaatgaagataagactaataaatgatacttagcagcttgtagagtttgcaggtcaagaatatctttctggctatactcggtacgatgttgtttttttaatgctacctcttctttggctagtagagctaatagtatgtcatctccaatgctgatactttggtttatttctggatgaataatgggaatgcctggattaatattattagcagaaattaaactattcaccttttcaataccttctttataggatttgaaaagatcttctttatctttgattcgttggttataatctgatttttctttatcatttaatgctacattgccatctgacataaaagttagcaatgcatctgaatagacctcatcatcgatatctccggtagagaatgcctgacgatatattttcagcaaaggttcttctgcgttaatctccagatcctgccatatatcgactttagtttgatctgaatcgactttatccttatttatgcttgctaatttttcatgaatttctatctttgatattaagatattgattgctgtatcgatatcagagctgttataattttttataaagaaaaggttaaatatattattaatgttattcagtagctcagaatattttatttcggaatattcattgaaaacggcgtccacagcttgtttcaaagtctgttgtaatgtagttgagtatttattataagaaagtaaattttctataatatatagagccatttctttaatatcagaggttatccaagttggatagtcttgattgcctttcagtaggtgaataaatggcttattttcattttcatctcgcttatactcccaatattttccattgaccgcagtatattcattttcttttaattgataggtgtcgtttttattttcgatatcatattcaaaatgtgacatataatcctccaagttgattaaatttattatttatttagctatatagctactatatccatttgatttatagaaatgattgttcatataaaaatattattttttgattttaaagtcacaatcataaggtagggtgattatagttaatctcaattaatataaaatatcaattaataacattgtaaaattattaattagtataactatatataactatatatacccgtaatcattgaagatgcttgattttatccgaaatggagatcattatcctcgctatgaaaatattcattaccgatgaacaaaaagccgaacttgaacatctccatcacacctgccgtgataagagggagtgtgatcgcatcaaagcggtcctgctggcctctgaaggctggagttcagtgatgatcgctcaggccctgcgtcttcatgaaatgaccgttaaccgtcatatcagcgattaccttaatcaaggtaaacttaaatctgataatggggggtctgatagtttgctttctcaagaacaaactgattttttaatcaatcacttatctcaacatcttttccatcacacccatgaaatcgtggcctatgttgctcagctctggaatattacctttagcattcccggcatgaataaatggctacaccgtcagggtttttcttataaaaaaccttgtggcgtccctcataaattcgacgcagaaaaacagcgacaatttattgaatattatgagaatcttaaagtcacagcgaaagacgaacccatcctttttcttgatgctgttcacccgactcaaggcaccaaactcggttatggctggatgcgaaaaggcgagaaaaaaacagtaaaaacaacaggaagccggactcgcctgaatatattgggcgcgctcaacctgaatgccattggtcgtacggtgttccaggaatatcaaaccatcaatgactacaacatttgctgttttttcaatgaaataagaaagtcttatcctgactatcatcaaaaaattcatcttattgtggatggggcgggttacaacaaagctcatcttgttaaggagtgggcttatgttagcaatattgagttacattaccttcctccctatagcccaaatttaaacccaatagagcgattatggaaggtcatgaatgaacaggttcgaaataaccgttattttgcggataaacatgaatttcgagacaacgtcttcaaatttttcaccacaacgctaccggatatagcggactcgctgatgtctagaattaacgaccattttcaggtgctaaaaactgcatcttgaagtttcttgggtatatacccaatggatttcaagatggatcgcggcggcaagggaacgaatccccgggagcatagataactatgtgaccggggtgagagagtgcagccaacaaagaagcaacttgaaagatgacgggtataaatatttatttatagctttttataattatggttaggacaatgtatctgctgaggagtgggctgataaggtctctgtggctaatacgggggttatcgggtcgggcaaggagactttccccctgcgcgatgcgatccgctaccgtgggtatccccagtggcctcgctccacccgtcgtttttggtatctcgacacgccgaaccaccggcggcatatagctgcccgaggccattcgattccagagtttgtacaagtttcctacgaggctcttctcaaattcctcaatcgattgaccatcgattcctgcgctacctttgttggcttttaccttcttgtacgctctccatactgccagtttggataacgcaaacggtttgggctggttcaccggttcctcccacttgtgcagttgacctgtaatacagccccaacgactggccccttcgctccacgttcatttcagacgtttcatcactactacggagccatctgcccttgtgccccgcatcggtactcaggcgcttgcaggttttctgcttgacgccgctcccttcacatcgggacgacaggttcccacgttccatggcagagcctgtgttgtgctcatgctgtctatatggttacacaacaaggtataagctactacgccttttccgcgaccaagatatttttttgaaccgtgggcctttatcatcgggtattcaacgctgaacttttgtccatcaacggcggcatacaatatgcccagctccagagagtaataaggaaacacagataactctttgatggcgttactgatacaatcggtgggggcttttagtgaagacagacgcagatattgcgcatagacctcattcaagacctggtagggaatacatttgtaaacagccaaaactctctaataagcaacagaaagaactaggactcattgaaaaagatccagatgtggttggttatgtattatttaatacgcgtagccgccgatttgcgacgatggatgaaaatgagtttggcatggtgatgtacgccgatgatcttgaagaagcctatttagcaccgttacgacttgatgcgttaatgaatattgattttttaccgggatcagaccagaacgataatgataccaggccatcatgctgtttaaatcccctgccaaaacgtcaacagcccctagccaatttaacatcatcaatccatgacaaatttttcaacctaacatgcaaaaagacaactttgagtaattcttcaacagttagcatagccaaaattgaaatataagtacagtttagatgtattataagaacagttgaaattggtatggatactaaccattggcaaataaaattcaattttaggttatttttcgtatcaccgcaattttgaagtatagttagataatatacagatatgcattttagcaaaaaaatcaatgggaaaaacaatagatatgtaaaatcatatcttacattataatatattgaaaaataataaagcactataaagaaagtcacgctagttaccaatgaatataagtaaactgataacttctgcttttttaaatatctatctagctcagctatgctatatccatatcctagtcttctggcaactaatatcccagatgaagtggctactccccaagatattgctaagaatgcggattctatggaggaaataacagagtgtagagctatataatcaactcctagttttccaatgagaaactgatacgtagcgattccaagcgaccatattatattggttaataaaataggtagaaactttgaaaaataatcaacaactagtggcttaaaagaatttaaatatattgtgcttataaaatacttataggtgtaaatttttactaatatataagaaccaacaattgttctgattattctagctattgttgttgataaagctgcacctatgatacccatctcagggaatgataaatttccatatatcataacccagtttaagaaaaccgcaattatgacctctagaatggttatttttgttgatatggatggttttttatgacacctattgattgtgtcaataattagtgatagtgaactaaataaatataaaggtgaagtgtattttaaataagttgaacaaagaagcgagacttctaaattatcggtaaaaatagaagatacatgataagaaaacaatgcctgaataatagactgtattgtagatactgttaaataacttttcaaaatagtagaacacttggagggaactcagtccaatttttgcaatctgatcaattgtagataatcccaaaccactaaacggactgagttatgcctatcatagcacctataccccgcaatgaacgacgccagatgaaaaaaattatccagaacacccgagataaagattatgctcgcaggctcatggccatattgatgctgcatcgaggcgagtctgtctctctggtcgccaaaaccctttgcgccagtcgttcttctgtctatcgctggataaactggttgactttatatggtctggaaggactcaaaagcctgcctgtgggcagacccgctgtctggaatttaatcccgctttatcctttactgtcttttttattgcaatattctccccagcaattgggctgcctgcgttctcgctggagtcttgagttttttataattaaaatcaatgaattattaaacataaaattatccatcagtaccttctatcgttacttacataaaatgggtatcgtgtggcgaagggcagccccgacgcttaaattacccgatcccgagtaccatgaaaaaatggcgaaaattaccgaggcattgtcaacgtgttcagaaaaacatcccgttttttatgaagatgaagtcgacatcgagctgaatccaaaaatcggggctgactggtatttaaaagggcaacagaaacgtatagtgacaccaggaaaaaaccaaaaacattattttgcaggttgcctgaatgttcaaacgggaaaagtgacttatgctgacgggttaaataagaattctcatttatttatcaatgtattggaagaacttgaacgccagtattgtcatgctgaaaccctcactttgattttggataattacagtatccataaaagccgacgggtcagagattggctggcttgtcatcctaaatttaattgttgtttttacctgtttattcaccctggctgaataaaatgagcgtctgtggcaatccttacatgaaacggtgacacgaaatatggctgtcagtatatgtggcaattgcttgagaaagtgaaacgtttttaaattcatgtccctacaggaatagcagagaataaacagagtgggtgtattataattagcaaaagttatttaataaaaacgatagagatatttgtattattaagtttcggctttttacatatcccgaaccaacataattcgataaaaatatagataaagtggcagttaacgatatgagcaatgtaatgtttagccatgttactttagccgcaattccaattgcggcgacattggcctcccctagcttagataccataaaaatatcgatataacctaagcaagagaaaaccaaactctgaattgaaatggggatggctagtcttaatatttcactaatcttcatagttttatactataaacttagagtatgtctatcactattttacaagtagaatagattcactgactgagtttaactttatcttatttatctcattgttttgagtgtatacttcttggaagttatattttgaataatttattctttccagaagtttaattaaattattgtcattgtataaaatggacgaatagagtattgagaaagagaatgctttttcaacaccaagctcattcactctagatataatgtcatcattatctattttttgggacaagaaatagtaatattctctaacatcacaaaattttattaaattgatatcttgagcaaaattttcccatgcttcgtttgaagcctctttatataaatgagtgcataaatggataaagaaatcaatattggataatgtttttttgttatttagaatagaataagttgataggattttttcattaatgtctttattgtcagaaaatgacagtccaaaagtaaaatctatagatataatatcaacagtgggctctgggtggattttacaaaatggtggaaggttaaacatctttactttccacattaatttgtcttcacgactaagttcagttaacgttttgtcattaacattatactctccttgaatataacctaaattattcataatttttggcaatctttttaagtcatttttgctaacaaaaaaatctaagtcgtttagtgttcgtgtaccatagtcggtatatatcaaatccaacaaaacagagccttttagaggccttatatcaatttcttcctccttaaatgccgttaaaatagtaatcaattcatccataagcacctgatttctcttggttgttgctaaataaatatattttatagcacttgctactctataaggtactagatggagtaatttcatttcagacagagacttatagacgatgcctacaattttttgcctattgactactgaaaggaaccgatcccaaggaaattccgtatgattcataatatcaatcaattgacttttattcacattttcataatcagttctacataaggaagttaatgtgtataaaatttttgaatttgtaactatagtattcatatcatatacctctttatttaataattactgtatacccgtcatctttcaagttgcctctttgttggctgcgctcgttcaccccggctacatcgttatctatgctatcggggatttactcccttgccgtcgcgatgcatcttgaaatctattgggtatatatatctgacatctcttagggtagggcccgcttagatcgacgatgctagaatttttaacttcttctatagataactgaataaatcacaaaaaatttattacatttagagctctgcctaattttatcgattatcgagaattgttcagtgagtcgaacatcaagagagtggcgttctgccctccgaggtgtactggcttatttttatgtttccgagttcctctggagctactttttttatttcacgtttaaatacgccgagtatactcttgtcataacgtcacctatttatctatgaagtagattcgaatacctccatcatataggcatataggtcgccaaattcatatgcgctacacaaccaattctcttgggaatagattgtttcttagattacttagacgggcaagatattgaaaagagaataaatcatatatgtgactggtttcacattattgttatttcttatgatttgactttaataagtcgtgctaaactaaaaatagtgttaatcatgttaaattggagtggttcatattgatgggaatattaaatttataaggttaactatatctctaattgttaatattgttagataactataatctataactttccatactttgtgaatcgtgtctctgcattgatagtgaaatgtaaaaaatataatggtagttagtgtcatatatgtgtcaccaatttaattatatgagggagaaattatgaaaatttcagtaataattccaacaattaataggccatcaatgctactgaatgcagttaacagcgttaattcacagaaattcttgaataaagaaataataatagttaatgatgcagaaaaatctattggtaacatttttttacatctacctaatgtgacagttattgaaagtaacttaggtaaaggcccaggtttttgtcgaagtattggatgtaaacatgcaagtggagattatataactttcctagatgatgatgatataatgttacctagttatttggaaagattacatgatgaaattttaaataacgttgataaatcttgtttttattggtcaagcgtgaaagttttagatcgagtatccgaatcatgtgtaagtcaattcgatataaaatttcctattgaatatgatagtttttcagatttggcagtgacagctttaaggattggcactggatatggacttacttgcgcaagagaagtacttaaggatatcggatactttaatccaaaatacagatatatagaagatacagaactagttgttcgattgctaaagaacaatattcatccggtacctataaatcagatttacattgaggtcaacaagcattctagtaatcaattaacatcaagtaaattcaatgaaaaaagaattaaagaatgttacaaattactttgtgaacagtctgatttcttcgataaatttccgacagcaaaggcacagctaaatagacaaatattaaagttggaaaatgagttgtattctatctactgacggtagttaattaagtattaattaccaactcgcactctagtgcaataatttattaatgataaacccgtttggagtgagtgatggattactacttaaatagactatcaaatcgagttacttttatagaccgccgtaattctgagttttacaaatggctatcaacaacaccagaatttcatatatatggtgatgatgcaaaagaaaaactcaactctaacttatttaggctgtcaaaaatatgccctgagttatttattcactacacgataacaactgacttgcgtgttaaacctgtaggtgaagtaaaaataaagataatggcttatgaagattatgagcatgaaatattatctgattataacttgataaaaccacttactttatttttaaaagaaactactaatggcttaagttttttctttgtcgtaaatcatttcttatctgatgcactttccaatggaatgatttcaaatctgttatctggagaggatactaactgggatttatatgagaagaaccatattaaaaattttgtatcttctaaactgggtaagaaatcaagaaataataaatataatttagattttataaaagaatactgtgagttaaaaattaataactccgagaaatcaagatttccaattagagatatgaaattagagtccagtacttcagttcttcgtcataaagttttaagatctacatcagacaatatgattacagcccatttaattaaagccatagcatcgtcatttgatgagtactttggaggagaacacctatatatagggttaaatcaacatggaagagaacctacttattcgatagatcctagatatacattaggatggttgaacgagatacggccgttgataataaaaaagagcgaaaatggttactgtgtcaatgatatcaaatccagagtgctaatgagcactctatatggtggagatactaatactctgcttgctagtaacactgaatatggagaggttggtatacaatttccatcaatttgcctaaatgtaataaataaaaaatggtttacaggaaaaattaacacacagtacaaacataaaattttagtcaatgatcgtggagcatgtcgaattatgcatataggtattggacttattattgactctgaatgttgtgatttaactctagacttctcttctcttgattacgaagagcattatattagagggttattttatttgttgattgaaaattttaataattcacacaatataaattttaaataatatgatgaacactaaatacgatctattaaagaatattctttacaaagaatctgggataaatcctgattatttggatatatataaaaaaggctttaattctagagatgctgtcaagtatttcttggttaagaagcccggagaactaataagaaatccaattaatggagctcctgttttaacattcatgtcatatgagcagtactttaatagtttaggagttaatattacttatgatgatttgagtcattattctctagaaaagaattgttttagagtgattaatccttgggggtttgtaggcatacagattggtgagtctgctttgttctctttaggagtatacaaccctaaagatatggaaataaatggcagaaattataaggtttactatgattttgttcaccctgaatatacatggaaaggaaataataaattcgaactatttgactgtcctaaaggtgaatcattcatatgtacatcatataatacatggcaaggtgattttacaggaaaacttggtgttaataattttcaagatctatatgaaccaaataaacagaccactattatttatgccatatgggctagcgggattaataaattatgtaaccttataggtatgaagtttgatttggttaacttagtgaaatatataaacaatgaaaagaagtttccttttgaagtgtccgaaagtggtattctctcagctattcatttagttggcccatataagttatttgaagtaataggtaatggtggctttataactgatgaaataggaacaagtgctttctcctatattgaaagcttctcattcttggagattgatcccatgttcaatcatgtaatggaggaactatgtcattcaatgtaattgaatatttgtattattcatcaaataatttttctcagtctattttttatagagatcatcccattgaaattacatatggtgagttcctttccaaagttgtttatttttcagattacttctctgaagtgatagagaaagtagttgctattgatattgaaagaaaggatataaatatgtattctgttttttcggcaatgtggaaaaacaagaatacgatagttcctttgatttcagattgggatgatgaatataaagaacgaataattaatgcagttaaagctgatatcaggctcaatcaagatcttagtgtatatcatataaaacataaagtagatagaaacgattcagttattataccagcaaaaactgcatacatattgttcacatcaggatctaccggtttacctaaaggagttccgattacacatttagccttaaaacattatattgataatatctatgaagaattggaaattgaaaaaggcatcgaacgattaactaatacattttctccagcttttgatcttttttatcatgatctatttctaagttggaagagtgcaagctccataactccggtagaaaccaaaaaaattggacaattactaaataaggtggaaaataataaactcacttattggttttctgttcctacactcgctcagatgctgatttctctcaaaccaaaatcacatcaactgtctagtttaaaagtttctttgttttgcggagaattattaagaaaacacgtcgtaacctcttgggcacaaatatctaattgccagaagatatttaatttatatggaccaactgaaacaacaatcgcatgtatgataagtgatgtgggtattgaaggcccacctagtcttggccgagctttaggggatatgtcatacaaaactgagcatttatctggaaatctatacaaattattattgtcaggacctcaaatttttaatggatatataggtacttcaaagaatagctttgtgaaaatcgatggtaaagtgtattacgatacaggagatttagtaactatattagatggtgaggtatattttgagggaagaatagatcggcagactaagattatggggcatagagttgatcttcaaggtcttgaagaacaattaagggtaaagaacaataatcctttggtttttgttgttctttattatgacaaaaatatagattgcaatactggaattacaattttttatcaacctaaaaacgaaggcgaaatatttgattgcggattcattaagaatgttaaagtgaaaggaattttttgtatcgaatctgtacctacattaataagtggaaaagtaaattataaaaagttggaattatgggcaaaaaatcaaatttagatattgaaataatagtaattgagtttatgaagaaatatgaaataaaatcacttgatgacttggattcatttcaaattgtttctttgattattaatttggaaaatgagcttgatatcaacctactagatgaagatcttacgtttgatgatttttctgatatgaattcaattattgtcttagtaaataaatgtcttatttaatgtgttttatcaacttatcataaattggttaggaattgataaggttaatgataaaggaaagctctatataatgggcatgaggttaatgtttttgtatgtgattttataattcataaacaggtgtaaataagcttagattgtgcaatgaaattattgtaataattacatccgttaataatattgtttatttcaatggttctatgaaatagaatatatgtaacaagagaaggtgaacaaagtatcaatttgcattagtttttattccattctatttggctttttcttcgaggagaagaaacaatgaaaaaatctaaagtaattgattcatactataattattgtctaaatggttggttgcctgaagcaagtaagaagtacatatcggtcttaaacaaagagtctgccttccaagagaagattctatcaatgtttgtatatgcaaccggccagagtagcgaagagtattgtcatattgaaaatgaaaagagagaaaaatcgatcgtacttaacgatatcgctaaatcctcagaactaaaaaattctgttctagttttgaaggggttatctgtagagcgcttttaccatgaaagtgcctcgcgattcgcttttgacgcagatttggtagtattagaagatcacttaccattgcttgatgctttgttgattaagcatggatacgatatatatttcagtactatttggataaaggatgttgttacagaaaaagtttataaatcattccgatatacgaaagggaaagatgatgatcgtggatttgaaatccatgttgatcactacccaatcgatgataatggttcgagaatattactacagtcgttatattctggctgctacaacactattttgagagggacatatgtcaatgtagttagtgatcttaattctatattgataatacttattcaaatttacaacaaagattatctaacaattagggactttgtggatcttctcattctgcttgaaaatagcgattttaaagcatgtgagcacatagtgagaacactaattagttcgcatggattaggtcctgctattgcaaagcttcgtcaatatattgaagctaatgaaattgacgttagcaagtatccaagtggtgcggacatagtcaaaatggtttcatgggaacttagtactccggacgttcctcaatttgataaaaagtgcgttgcattaatatcagacgatccaaccgccaaatcacgggaactgtttgataggggcactcctacaagattctaccgtttgtttaaaaatgagaaggtagacgaaagtaatagcttcaaaatggaaacaaatattggttgtttttacgggcaagtaacaggagattttgttgtctatgaataacaccaaaatactctcagaattaagtgctaaaggttgggtgtgtgttgatacaccttcataccttggccacagtgatgatatgttcactaattatattcgagacactataggcatgcataccttcggctttcggtctgagattctaggggatgtcgcgtctatcctatcccctaaagaaggtattgttcaatctagaaaaaagttaagaggtcacactgatgcaagctttcttccattcgataccgagtggaagaaagttagaggtctgtcgataatcccaaactatgtagcacttctttctatttgtggcagtgatgtgggaaccacagtctgtcatatcgaagaaatcttatatcacatgaatgatgatgaaatttgcgagcttagttcaccaaattatgtatttgagtggcaaaaatcatttgttatggagtccaacgagttagatagttcttggaagcctatccttcatttttctgatggtttttttcaagttcgattctctaactcaataaagacttataaaacagagaaagcaaaaaaatgtgcgataaagctttcttcattatatcaacgcttgtgcctgaagattgcgctgaaaaccgaccagttactcatcgtaaacaacagaaggtgcattcatggtcgagagtttatttctgaggaaagctttagtagaaagttgcatcgatattacctctatgaaaaagaggacctagtggttaaaacggatattaaggggattgtattaccatgaaaattaatgacagttataaaaagaaacctcatagcaacgatctgattgagctggaaaaagtattggatctcggtaagctttcagggaaaagtgatactgttgagcaatttgagaaaaaaatagcagagttgttcgaagttgatgatgtagtgtgttgttctagtggaacgagcgcacttattgctagcctaatggctgaagacatttgtgctgatgatgaagttttagttccgtgttatacgacgatacctacaacgttcccgatcctatcagttggagctaagcctgtatttattgataccaaaacgtcacatacaactgaactatcgattgacgatttactaagtaaaataaatgataaaactaaggctataatagctgtccctctatggggatatccagtcaattatgatgagattgctgaagtttgtaacagtcgaggtatcattgttattgatgacgctgcgcaagctcacttcagtacatttaagactggtcgtctggttggaactttctctgattatggttgcttctcgcttcatgataagaaaatcctttctaccggagaaggtggctttatcattccttcgtctcctcaaagaactaagcgtttgcgagaaatagtcaaccttgggaaccttaatggcttgtcatttggcttgaatttcaagctaggttcactccaagcggctttaggtatctcaagatgtacacgagtgtatgatgaacttactattcgtagagaaaatgccgagaaaatcaaggagggcatagtgagcacgagatttgaagaaattgattgcctaggacaacctaactactacaacctagtacttaaagataaagatcatagagaccttggcaatgttcatgaggtactaaaagatatgggatttgaaacggactttctaaaatatggggaggctaagtataagtttggtatcctcaataaattttatgatggcagtattgagaaaggagatactgtcctcaaaaatctgataaccattcctacccatccagatctttctcaggaaggaatcgactatataattgaaattctggagaaggtttcatgctagaaaaaagccttattttaatcaagccggatgctgttcatcgagggcttgtagggaaaattatcactgagttcgaagaaaaaggattcaaaatacataatatccgttctttggtgctaaatgacgaagacttctacttcttatatcccaaaattttgggtaaaccctttcataagcagttcaaaacggtaatgcagtcagctccatcaactttgctggttctgagtggacataatgctttaggaagtatatttaacttcgccggagcttactcaaacccagaagaagacactacacgttcaataagacaaaaatatagtgtctggacaggtgcagatgtaatccatagagcagctgattccaacgaagcgatgaagcaaattgcctatttctttgatgaagtttgcgagtatagacataataatgaagcttttatggctaaagagtattgggagcctaacgtctaaaatagctggttctgccccttagttcagtgaagtgagagctcaaatgaagttatcctaccaacattatcagttctgttagaataaagttggtaggtacatcttggcctgacctcgataactaatgctaaatttctttagtaataaccgtcatgttactgttgtttaatcctgttattatggtcgctacaaactcagacggagctgggtaagatcctttttttattctgccgccacacatagtcgccggttagattgatatgttcccaacccaatggtgacagatattgcaataattgttcatcaatcacattgccagccgcatgcagcgactgtattgcacgttctaaatacagcgtattccatcgtacgattgccgctgtcactaaattgagtccgcttgcccgacccgataacccggttttgccttactctttacctgagtgcctggcagttttataacggatttcagtttggtgattgccctaaagagatgaaagtgggatttggagaacagggtttctattagttaagtgcacgttgtaggttaggattttttaagctcgtagttgaagacttcaaattgttgtcccagaccgatttccaggttgtaccaagattttggccagaaatcgtcagtgaaccagcgagaaaacgaagttatgcttgggaagctgaattcgccgaagttgggatcaaagaagatgacacctttctgatcatccacataggccgctacagtatgtccagccatttttccgagaaaactaattttcttgtagcctgagcctttatcacccgtatccagaatagcgcgtaataggtctgttgtacctttgttaccggtttgaccgactaccttggatgagtgttcgtccacgtcgtttttttgcatgattggctgaatgccttgcgtaccaagccagtactctgtcatggtactttgttcatcatctagataactgtccatctgtaactgcttaatggaaactagtgagtcgatatgaaattttcccttttgtcccccgacatagagttggtcaaagatgctttcacccttggcatgggcgcttatccaatgagcagatatagactcgcagacaccgcctgaggtgtctttgtgtttcatgatttggtctaggaaggtccctttggtttgggcaaatttgaaggtgacttgccccccgtgtttactcgccgaatttcggactttacctaatctggttctgaccccgaaatgcatcattctgtccattatcatggcaggggagaatcgactttcttggtttttcatgccatcggtggttagctcccgatcgagcatagaatggcctggcaggttgcgttgcaaagtggtcgagaaacgttcccgtaaccctgctctttttctgttagtgtattgagaattaagttccaatggagtcgtggtatttatatcctccttatcatgttcgatagaatcccttaattgtattgggcatttttggggtttttctttttcactgtattcatgttccatatatattacctctaaattaatcttctaattgttgaatattagttctgatatttcaaaaaaatagtttttaaggcttggtttagcttgttttttatcaactttcagtgagagatcttatatttctcggttttttgcgttttggaaaaataaatgattctggcgatatattggcgtcactgtcatgtttatcgtattcgtacaccataattatcacctatgagtttttagtgagaagtgtttatcttgtggtctgttatattgataattgtactgtagctaagatgttaattgaatacggggtaattcaaccacatcatcataacgtttgcgttggttgatattatcgacctgagcggtaaaacgattattttcatctaccttgagagccggtaaaccaagacgatgggtaatgccgggtaaaaagtgatcaataccttcatgggattgcaaatgagcattaccataaatggcaacgaacttctctcccgcaggcaattgccgtaaacgttcaaccgccacgttattagctgcccctgcacgatacatcaggccatgttgtgttccttccacggtagggcgagttgtgctgttgttatctagtgcaatgattttcatctgcttgcttctggcttgttcaaacaaattcgcagataaatgtttagtcttaagcagtgcggccagttcagcaggcatgggttcatttccacttgccaggaatttatctatcaacggttgagctaaatctgagcgtaagtgttccagcccaatgactgtcacgccatgcgcttttaatacttccatctgctcttcgacaaaacgcaatccgttcagatctgagccatgactttcaccgatcagtagcccttgacgatctttaagtaaaagagataactggctgttcagatccacggtgttattcagttgatgattaaattgcgtcagcgcatctgaggcaaattgctgatcccaggcagtcacatcagtgtcatgagagctgtgatatattgcttctatttgtgccaatctactgtgttccagttgggccagataggtaggattagcaaaccggtggagcaaaatgtcctcttgcgatttagtagaacccggttcggcttgtttggcagcttctttaaggaaatagaccgccatttgcacgctttcaacgccagtcatatctaacagctcattatagctgtagccaagatggacctgtttattctgttcatcaagccgggtatgagtcagcaattccttactctgggcggtgtccaaccactttttaaagtcatcaaattgagcacctagctccacgtgaaacttaggttcaaaaggtagatcgttgggaatttttccttgatagccggttttagcagcaagatagggatcttcttttacccagcgtaccatcagatcggttagcccgggggtattgcctttgacctcttcacgagcaatctggtagatatgcgatgccatttcagggcgagtttccgccatttccaacaacgagtggcgtattttctgcaaagtaccggtaaacatcagatccccaaactgcgtttgtgtccttctcagggcagtattacgtttagaatcaggatgttcctctaggtaatgggtaatgcgtcgatgcaattcgaaacctgccgccaattgctcattcccacttaggtgatggagatgctcaagttcatccagaatttcctgataggagggaccaatccgtttggcaaaaaccgcagcctctttacgtaaattattgctggtgatgagatcgtggagtaatggattattttgagacaattctaatgcctgttcagatgatttttcattattattcaattgtatcgacggatttcttcttctttcgatggttttatcgtattcatataccatattatcacctgttaatttccgggaagagatatacccgtcatctttcaagttgcttctttgttggctgcactcactcaccccggtcacatagttatctatgctcccggggattcgctcccttgccgccgcgatgcatcttgaaatccattgggtatatgtttgagataaatactatatggattaactattgtcattttattttttaaaaataaagttaagtatattttaatatataagtaaagttattttataaaaaattttcaattggtgttgtaatgtgtttttttataaattaaaggttttaaattcctattaattgatcatatttatcttctgaaacaataataccaatgtcatttattctgacaacggcgcgatgactatttttccatgttgtaagaataccttttactctaggtaaataatccaaatggataataccagaaacttcaagtatgacgttttgattattttgtttttcattattttccttagtcggcttggttgccagattcattttcgcaagggcaaggcggacatcttctgtgccacctaaattggagcacaatttgttaaataaggcttggtctatttgcgaattatccagatttgatttttgatccacagaagtggagatttggctaacgggttttatgatatctttaatattttgtagttttactggtgcggtaattgaatataataaagaaaggcgagggcgattgccgagtgcttgccaaaagttacctaagctatttagattttcttgtggtggaatgactctggtatatgcgccaggaattttaggtaattgtcggttgttaaccagtgcatttaaaatagctgtcatgacgcgtgcagcttgattattgggctgactgtcaggattggaaccgtctcctgatggttggtttgaatgccagtaagtaattaaatagttataattaatatttacccacccagacaataatgagctagtaatagggttataactctttggctccgcagaacgtaattgtagatcttcatgtatatcataaagaaatacactgacggtaggtttagccggagttgagttaatttctggcagatcaaaacggatatcaatcatttggttagaggtgtttagatgttgagataaaatttcatgcaatgcggtattaactgcaataattgcattattaggatcaattatatttgtcatatcgactccaatcttattaaacgtttaaaaaaacaatcggccagttttattcaattcgagaataattgcccgttctatgtgtttattgtcaattttttcactattatcatttgcggctaatattgatgataataaagcaatattacggatatttgcacctgtcagatctgtctgtttagacaaatggtcaaaattaagctcatctgataaattcaattgcttaggccaaattgcttgccacatctgtttacgtaatatttcatcgggataagtaaaatgggtaataaaggtaaaacggcgattaaaagcactgtctaaatggctacgattattggtggctaaaatcactaatccgggataatcttccaatcgttgtaacaaataagaaacttcaatattggcatgtctgtcttgagcatctttggtttcactgcgtttaccaaataaggcgtcggcttcatcgaaaaacagcacgccggaatcggcttcggccagatcgaaaattcgggagatatttttttctgtttcaccaatgtatttattcaccacggtagagagatcgactttaatcagatcaacgccaagatatccggcaatcacttctgcggccatggtttttccggtacctgactcgccgtaaaatagggcgctaataccggtaccataacctattttctcttgaaaacccgtgtttaatacttggtttcggtaattaatagtggcaataatttctctcagttgttgagttaatccctctgaaacgaccaaatcattaaaactgcgcttgggtgttatccgttgagctaatttaccgaaattttgttgagcgcggaaatttaatgccttacgcaaatcgatctccttcaattggtcttccggttgccggagtatttgatattggcaggcttctttaagaattaatggtaatgtttccggtgtaaatgaaaaacgttggcataactgagtaagattaatttcccgatcagcattatttggcagattttctgtcagtatcgcttttttctctgccagtgtggctactggcatctcaatttgtaccattggtaagtgttgaatccatacgaatgaatctcccggttctaccagacaaactacacgtaatttggattgattcagcagggtggataatttgcttagccatatttgcttttcctctgcaagtaaagaaaaattgcggattaataagcaggcatcatgtagccgggcttcccgtattgcgtctgttaacaaacaaggtttagtgttggtattctcttcgtctggtagatgagctaaatcgacaattaaggtactgatattatgcaatgccataatattactgaccgctaattctctggcgctgtcctgttttcctttgaggatcaccagtgggcatatttcatctatttcatttaataatatcttgttaagtgaatgataaagggtttgcggataccaagtctgtgaggtagaagagtgccaataagcacaggttatcaggggaggtaaaataacccgttggtcggataaaaaatgccagacagcactgtgcgttaaaaattgcgtttgtaaccaaatgggttcctcatggttattaagccgtaatagatggtgattgattaatggtgtttgcggtagaaagctattttgcagtaattgccaatcattttggcgttggctaaataattcaattgccaaagcaaaactcggccactgttttttactgttaccgtgcagaaaagcaaatagtgcatgataacgactgtcaaaatggggtaataaacctaataataaggtatcacgctcaaattcagtcagttcaaaacgttctattaataatgataatctaccggtgatgggtttattctctatgtccttataatcaataatatcactctgttttaaccaatgaggcatgcctaatggttttactaaacgttgttctatttcatcttcggtcagtaaaaaactctccggtaaggagtcgtaccaatctctcttttgataatagtagcgctgtaatagcagatcaatacgctccaaatggggataaatccaatctgattctactgccatacagtggttatttttcagaggaaagttcatataaaccttttaaatgttttgccagttgattaataaaggacgatccagccaaggtagtttggcgatatttaatggccatggccagtcagttaatagtgcatcaaacggttgttgttgaattgtgatgctgatttcctgtttatctattcgtaattttcctggccgttgtaaaaataactggcgggcatcattgcggcttaattttttccaggcaggaagttgagtgataaccgtatctagccattgttctgttgccaactgtttttctggttcaatgggtgctgactcaatattctcatcagccatgagtccacataaaataggatttaatcccttgtgttctattggtgccttttcagttccccaaatgagataatcaaggaagacaacggcactgaattgagcttgacgatggataaattcttgcttttcaagtagaccgagttgattaaacagagccggtaatatcggccataaaactaatattccagcattatttacctgacgtgaaggagagtattcaggcgataaaacgggttcagaagacacggatggttttttactcgatttatttttatccccgtgtttaggaataaagtattctgacagatattggtattcttcaaccgatagatattttttacagtattgtgaaacgggtgctgtttgccagagtggttttaaccaattatttaatggagaattacgggttgcagtctggtgaaatagcgtaataatagatgctatattaatcgctccgttattaagttcagtcgtgatacgtgagataatttttgcgtcggggtcaggtatttcttgtgcattatgttgttgtatatatctcaaagcattcagtattaattgccaggaggaaacgggttcctcctgatgctgcggtgtgattatgttttccgataacttgtgattaatgacaattaacaaagagggatctctgatagctagaagtttttttaaactatgctcagataaacagctttttgctaataagagtgtccagtttttttgtatatggggtaattgattaattaattgtttaatgttgatatcagtaatttcactattcttaatatcctctattttatttggtatggaatttttttgctgtaagtaatgaataaatttctcaatatcagtctgattatttacctgatattggtttaatgcttgacttaatctagcattaagtcgaataggaaacagtgaattaaaatcttgtaaatttatttcaccaaggttcagagtgagtgtttctaaatagatatttttgttaatgatatattggttgaaatgggagttgattaatttatttatattggattgattaagcagggagccatgtaatacttttttagctacctgcgtgttattagctgtgatagtaataataattcgatttaatagatttggttctgaaaccatattaatattctctttgtaatattaggcatcatatcataatccttatgaagctattatttcttcactgtatgcttctattgaagcagaaggtttctttcctagtgttaatgtttctagaattttatatgcgtgatcgcctaaaggagcaccattattttgccaaagtttataagtactggcaaattttttgaattcttccgatgatagccaatgaataacgagtgagatatgagtaggtaattcagctaaaatttcagttttcacccaagattctaatttgtaaaaatcagtagtaccgctcctaatgcgttctcgattcagtactatgctgactacaaatgaaaaatggtcagattggatatatctttttcctgagaagtaccagtaagagtgcgactcattgttttccaatggaaaatcatttatttgatctatgtttttttcaactaatattcgtttctctatgcgatcaaattcttttacctgcgttttaagttcataatcagggtcaaattttagtgttatttcatcatccgcttcgaatatatcaaaaggaaaactattgtaaggagtatcatcgggttgttttctgatagtaatccagagttcattttcatttgaggttgtatcggtagaaattaatttacatgtgcgttcctctccgtatatgtagtcatatcttgtgtaggacaagcaatagtgtgatatatattctcttggtggaaatttattttttgaatttatatcttttctaagtaatatccggttattagcactatcaagttgtacaatttgggttgtaagttcataatcggacttggttcttattgtgatttcatcattgttttcgatcatggcagggaaggagttttgatcattaagggtaatccatcgtctattttcggtttcttcttgactcttttcactgtcataaacgagttgataatccatatcttctatccacacggcgctattgcaccagtgcaggctattgcgctgcttaaatgcgttttgcaatttgtccagattgtttcttagatcattattgttattggtattaatagtgaatgtatctcctgtcacttcagtgatcattaggttcagaaatttggatatattgtagccttctctaaattccagattaataacttgaccttgcattaaatggcctgctgtatcagtttgtgtaatcatgacttgatcatttttaatttctagattatcaggtgtttggtcattattgaatttttcattaggttttattggtaagagttgacgatgttcaattaaataaaaagggagtttatccagttctggtgtttctttgaaacactctcctcccagacccaatcgggcagcaatgcgtttttgcagtgctgacactttatcaatacgaatattattacgttgataggctaaactaggttgttgagaaagatattcgcgctgagtagatagaaaatcttcctgagaatttgagtcttgtgatagaagaggggttgcacattgcgcaccaaaatatcgcaatagataatctagtattaccaactctttagtatagtttttatcattattattgattttagcttcattattcatttgattaattaaatgaggttttatgttttgatgaacattttgagcgacagtattttctttaaaaggccattgagcaccatgtacagtatctcctcgttgtttaaaagccaatagttttggtaataaggcgagatcggcacagttattagcgagagtttgttcaaaaggtaacataaactgatgtaattgtatttgctgttgggtattagtttgtaatccatagcaagcgggtaatttatttcttattggatagtaatccaggatcttacgatatttaccccaatccagtaattcaggttgtgtctcaatcagtggctctacaatgagcttttcctctacatcttgtttggaaacaataattttaacgccacctttggctgtaatggtgagtgggctatttggtgaggtgatcgattgtaagggatcgttgccccatagtctgggatagtacccatgaacgattgtccaggaccaattatcatttggtagtttagcaattctttcattatgcccatctaacgtgaatcgggtaactttcttgactcctttgattctcagtaattggttaactaagggacttaaatttagttctttagatttggtgtaatctttaattgaaggcaattgggggatccaaccatgacgtaaataggggccattaaaaatttcttcattactgtaacccatttctttcatcgcttgggtggtataacgtaacggtttttcaagaaccatttgttctgccgttgtataaactttagcgaatatatcagtgatatctttaacgtcatcatcaagttgaatatcaatcttcaatggtagatcgatgggttccagccaaataattttactgactgactctcccaaattgcgattgtccctcagaaaattttccaactttttttgagcttgaattttattatcttgaattttttcagtttcccggctagggagcaaataaagccaatagtttcccctcagtgttaattttaactgtgttgaattgttatatcggtttttaataatgaaactgtattgccgttcttgttggttataccagtatgtatagcgttgattctcaggctcacgaataagctgggcatcattaaagaaaaaatagccatcatttttgtcgttgctatgcaaatccaataaagctcggcgataatcttcttcagtgatggggccacaagttaatatttgttgtgggccaaactctttagggaaaataccgtctctggatgtttgttcctcttgtgtaggagtaagaagatctttcagtggtaatgaatggcggtaagctaaatcagatgcgccataacaacaagcttctaataaggtgatacccggatcattttcccccatatcgttccaacattggccggattgttgctcaataacggtttttgcctgggcaagtaaagtctcaaaggcaatatcatctttaacaatgggaaatagcatatttcgattattcatttgtgaactccttcgtttagggtttttatttccagactaaaatcaatacttcgtcatcgtcggcttctacacttttacctatgacatcagtggatggactgcctttttttaaagtcaaactagtgacccgttcaacccaaggtgattgttgaatcgtggctaataactggtaatagtcaatgcgattacctggtgttacgccaatagccgtattttctccccacggcatgtagattcgactcagctcctgttgtaattgatggcggccgtaatcgggattaactcctgaagcaaatatcaattcatagctaatcgggacatcaacgtatgtgggattattaatttcaatggttgtccaggggctgcttaatcgatctaaccattcgaccatttcagttaatcgggcttggttcaattctgggcggagtgaatcaccattatctttgtagcgattatcagggatgacgattaatttgcgcttttctggcgcgggtattttggttaattcattggtagaaggatatttgacatcaaatatgctgataaaccgctcttttagtaaggtgacaatatcgccccaatttaatgctcggttacgatgggacagccgggcgggaacccgtttcaggaaggtttgctcgtcttcttttggacgactattccaagatgcccaaggttgcgccacttcactgattgcaacggatgagttcaccggctgtttaatgctgttggcggctaatccgcggataaagtaatcttgttcgacggtcactgtgttgattaacgtggctgttgtggcgttatacaacaatcctttaattcttggataatctggagggactatttttacctgttttttctcctgttctatttgtgctttcagccaatatcgccctgatggcatttgagaggtttggtttgaagcatcctggggtaataggatactttgatcttctgattcaaatagattatctgtttggttgtaagttgatctatttaataatttccaggtatttttttgactcagataaaaccaagacaaagagagatctttcaggccctttagttgccaatagagagagaaagtttgtcccggtgctatatcggtaaaacctaaatagaatgtatcgtgagttaatgctgttatattttctccggcttggtctttgccaaaaggcgtgagaggataaatggagaattgttgatggaaagctgtcgcactgaattccacctgtaattcactgagttgtggggtgtagggttgttttttacctgtaggacgttgctggtattgagcgtgcataaagtcttgctcagcgagttttatttttatactcattgtctcatggttgtttgaatagaagtaatacttatcaggtaaggtaaaagtcaggctttttccttgtggtgcattttcgccatcaaataatgacagaatttcatcaagttttttctcttctctatagggagtgacaagatagccttccactttaaatacattattattggtaggtttattagcatatcctttataccacgatgaaaagttctctgtgggtaagttgacccattgaggggtaatagtgaatgttgtgtttgatacatattcggaattaacccattcagggagcactaccttcggactaaaactggagtccagtgatggcgattgaccaaaagggaaacgagtgatttttgcttctgaattgtcggaagcagagagcacgatgttgctgttaatacatatcttataaatccagggtaaagtgaaatcttgagtggttgtcagttttaacaatggcgtatcgaacgtcatattatccaaagcatcaggggggctgatgggatcattgttatcatcgtctggtaattgcaacttaatactatcagtgtcactgagatattcgactgacagtgttaaccagtgattccctgaacttattttagcggctatgttctcagaattaccttcccatttacttcccaaaattaatgtaatgttgagccctttttttaggaatgtgaataaaggccaagtaattagatagccggatagcaccgggatatcattagatgttggactaaaaatctgaataccgtttgttggtaatttcatgttatttgaaaggcgaagaggtgttgcagatttccagccatcgttatctttccgattccaatacaggtcggtcagtattgcttgacttgtctgtaaaatttgtgctttcaaccagtgccgtccctttggcatttgagatgcttggtttgaagcatcatggggtaataaagtactcaatcctccgcggttaaataggttgcgggtttggtcgtgcactaaattatctaatggactccaggtattttcttgattgagatagaaccaggataacaagcgttctttaataccgtctaactgccagtacagagataaagtttgccccggtaatacatcagtaaaacctaagtaaaatgtgttactgattaatgggagtgtttctgcgtttgctttgtcccaaccaaaaggagttaggggataaacggaatattgtccagttttgatttctgcactgaattcaattttcaatgaactgatctgaggagtatagggttgatttttatccgtaggattttgccaatactgagaatgcataaaatcctgttcagctaattctatacgaataaacgctggccagtcatttggcgattgactgtctgcaataggataattcattgctggcaaaggaaaactcaggctttttccttgtggtttattcgttccatcaaataatggttgagcctcaatttctttttgagtactagcctcttttagtttgtttttttcctgaggtgtgactaaataccccgttactttgaatgcattattttcgggttcaggattatatcctttataccaatttttaaagcctgttattggcaatcccacccattgaggggtaattgtcactgttgcattttcagtgccataccattcaggagcaatcagattgaaaccggagcctggcaacggtgattgaccaaagggaaaactagtggcacctgttttttcaatactaccatcagaggaataacgtacattactgttgccgctaatgctaatttcaatatccgtaatcttgggtagtataggcccctgaacggtgcccagctttaataccggtacattaaactccatattatctaaggcgtcagggggactgatggactcatcgttggctgataagcttaatatgagtttaagattgctccctgctttttctactaatagtgaaagccaatgttttccagaactgatctgagcagtaatgttgttaggattacccatccactcatttgctagagttactctaatactacgtactcctttcgacatagcaaataaagacgaagtaattaaataaccggacaaaactggaacatcattaggagttgggctaaaaagtcgaataccgttttcaggtaattcaatattatctgagtcgcttaatagtattgctgatttccagctatcgttatctttccgataccaacgtagatcggtgagttttccctgattcgccagtaaatcagcatctgatgcatattgtaatgggtttccagcgctatcttgcccggcatcaaacagggttcctttagggataagatattctgcattatctggatttaaggtaatgcctaaagcaacgttatccgcttgggcatttctgggttttaaacctaataattcccgataataaagatcacgatgtcgtgccggaaaagtattaaataaaactttggttgtttctaacagttttaaaaaagctaatataaaagcttgatgagccggtaaatgtccatccgctttattaatgttttggtaaatatccgctaatttttcaggagtattttcctgaataaagtagaaactgtcccagaatttatttctatcttgatcaaaagggatttttgccgcatattctttaagccagtttaaaatatccagtgtacttctttcatcaagtttaaagtctgtctctggtacgatagcggcgagtttattttttaattcggtaagtcccatattataccacctgttatttgaatatattgctgatagctttgtacaataggatggttatttaataatgaattttaaggcgttatttatccggcactgacagcatattggctggcaataaaacggccttttcccatactgggtgttgttatatccggtacgcctgacggattaatcgctggttgtgtcggggtaaaacgagcagtaaattgttgcccgacaataatcactgagtcagggctacagcaaaagtttacttgctggctggtatccaattgggcaatggtgactatacccataccgggtgttggatggctggaagtaatgtattgcgcttgaagttgtacctttttttcatcgcccacaatggcgatctttttgccctggatttgcgcgtgtccgctgcctttaataattgccggtcccaaaatggtgacctgccggttaccaaataatggctcaaatagcagactatcaccatcgacgatgagttgtttgctcatagactcacctttgcctgaccttcgttgatttcgagaatgctttcaagttgttgagtgattgcgctgcctcttaaagcataagtcacttgaatatgtaaggtattcggtgaatttgttttttgggttacctgaatatcgatgatttctgcgcggggttcatagcgtaatacgcgttcttcaatgcgggtttgaatctccgataacaattcatcactgatattttcaaacatataatcattcagaccacagccataatcttcacgcataatccgctcaccgggttcagttaaaaaaaggattttcatactttggcgaacattttcggctcctttggccatttctacgccagtctcaagagaaaactgtggcggaaatttccagccgcgaccataaatatcggctaatattttgtttgtcatttcaatacctcattactgtgttaagttaattttcgcgcctttaatatcgacgccagattttcccgtggccgacagagatttttccgcttgtatattaatttcttgggcttgggtgatgagatttttcgttgcattgagcgtaatatctttatcctgttgcagagaaactttattttctccgctattaagtgccacggtgttttctttgttatcgaatattaatgcctgttgtttatctccttgcttaatcactaaggttttcaccggatttttttcactgggttctaacggtggtttatttttcggattgtgcatggaacctaatatcaccggaaaacggggatcacattcaaagaatccgataattacttcatctcccggttctggataaaagcaaaatccactttcatgactggcataaggtttacctagccgggcaaaaaggacaccttgagtgaggtttaatgccggtattttgaccggaatacggcctagcgattggctatcttgctggtatttttccacgataccgatatgtaactctttcacttgtggcaccggaggttcgatatctggccgcatgcctaaagttaatcgagtgcgccagccttgcttctgattaattatctgatttatgccggtgataatcccttgaccatccattccttgaccaaagccatttaatgccagaatatcccccggttgataacggtgattaccttcgatttcaaaactaccggatatattatgactgcgtaagttatccataatgccttgagcaagatgtttggcttgttcattatccaatggatagctgtaagcccattgccactctttatcggccggtgcggcgatgctgtccacggccaatttatgactgccaagcttactgttttggctattgattgcttgagaaagcttttgttgagtaatatcccaggcacggatactcaccgttttagggctgtattggttattccactggagatccgcttcaaatagcacgatatcttgagcattattggtatgtcgatgaagggtatgtaccgttgatttattcagggccttgggtgttatcaaggtaaccgattcattgccgggcaacagccaggtgttagtggcggtcaatcggctttttagaaatgcccagtcattacaacgaaattgcaccatttgttcatgaacggttttgagttgtggtgcctgctttatcgtcgtttggatgccattctgattgaagagttttttgataattgcttcatcactctgtttattgaatagctgtgagtgaaagctatgggttaatttttgcaggtgatgttttgctgtcagggtaatgatgctgtcctgacctttaagccccagtgtctgccgaacgatgatccccttaaataacacggttttttgcatttgtacgataacttcatggttcgggcggcagcttgccaattcagcctgtgtcttggtgtcaaaaatagggttggcatcaccggcgatacccagagtgatgttggccgaagggataccattgatgtgatggttggttgtcaagctgattacggtgaattggttgagtgtcttaccacctattttgagggttactgtgggtattttcatgtatccccccgagcttgtagggtctgtccgggggtaaagtcatcaagattatccagaccgttttgccatgccaacgagagatagtcgatacccccggccagcgaagcgccagcacctaaggcgattaagggtaaggaaagcatgtcagtcacgctaaccgcagtggccggaggcgattttaactgtcgctcggtagcctgaataacaaagctttcgtctgccaccagagataaggtcgcactggcccgtaatggggtggcgtctcggtcaaataaggtgtagctgatggcaaggctactggcccggcaggcaaaataacccttgttttcccaacgcattttgccccatttgattttaagaaagtgaggtactttggtgctggcatcaaccgcacacagggatttcagcgttgcaagctgtgtttctattggtgtgttattgccgggcattgatgcatcaaacagcaggactaaggataatccggcgggctgagatagcacataacggctgctttggctggcacgattaacactttcatcctgttggtaacgggtttggtaatcaagctgaatggtatcggggttatacatcgcctgtaagctccccacggaaacttttccttcccggtctttgaaggcggaaagggtgagtctggataaaccacgttcaattaaactcataagcacctcctgtttcacgtaatgcttctaatacctcccgtttcaccatctcaattaaacgggcgttatccagtttttcctgagctaatgttcgaggggagagttgatcactcgtcggatcgatgacttttgtctgaataatcagttctttaatttctaccgtcatgcttttactcctaaccagcgcatatcctgataacgtaattccagagagttcaccagtacggtgttgctattagcatcgaagtcgctggtggaccagcgaacgggtagcgcgttactgactgtccagcttgctacgggcaatgaatgttcattcagtagcatgataacgacatcggcatacatcgctttctcaccacgcagaacacgatcaaatatcaaggtgagcggggtgatgatcatgacaccacgctctagcatcaggctgccatgttggatcttctcggctagccaaatatttctggcgttttctccaccttggctgtgttgggtggtttgtagttctcggctcaggcccgatatgcgctgaaaggcgatatcaagtgggctgggaatgctgttaaacagaaaactggcgataaaacggtgcgatactgatggggtgtataagttgtgcatgtttttcccctgtttggattagttacggatatcaaacgtcagactcagctcaataaattccgccggaattaacagggccagcctgattttcatgatcatctttccggccaagatatcggtttcactcattgattcattaacacccagtaacacctcaaatgcttgatcttcctgagtgcctcgtaatccaccttttagccataattgacgtaaccagttgtgggcctgacctttaaatttcatccaggtgatggcgttgttggattcaaagacaaaggctcgaccgagttgggttatatgagtttcgatataggaaaccagacggcgaatttggatatagcgccagggggaacccggcgtgttgtccagcgtgcggcagccccagattttaatacctttgccggggaagctgcgaaccagattcaacgaagtgcctttttgattaagattaaggaggacacctgcttcaatgtaagagcgtaccgggctgatcactttggctaaagcaacattggcgggagcagtccacacccctttttgatggtcattgcgttgaatgacggcggcgatcgcagcagtaggtgaaagtacgatatgtttatcttcttcctgataggtacttttcagttttggccagtatacggccccccattggcgatcacttgaggaaaaatcagccagacaatcagcagctagtgttggatcgtccggggcatccagtaaccccatgattccgcgccgacttttacaaagttcaagtattgattgccatgcttgttgccaaaggcttttttgagtgtcgggatcattaaaacgggtagtgtcaggcacaacaatcaatgtgatttcactttctgcggcaatggcttgttttacccatgcttgttgtagggtggtgatcaatagttggaaatgggttgatgattgataatcacccaatgacagtgcataggcttgttgtccgccgttttcaaagaagtgacgcacggagtagtacattaatcctgattcaccaaatgcttgggtaaattcggtcaggctgtttagtttgacagcggttttattgcttgggttttcttgggtataaccaatgaaaacggggacaccgataaattcattgtttggtggcagggatatacggctttccgttatcgtgacgcccggctgttttgtctctgttgtcattatcatctcctcaatgattgaatagacgcggtgttaaaccgcgccttaataaggttactgtgctacgtattgtgaaaattgaaggataataaattcagccggacgcactgcggccatacccactttgacgatcattttgccttgctgaatgtcagtgtcggacatggtgatacctttaccgatctggacaaagtaggcttcctgcggtttatttcccgctagggcaccttgttgccaaagttgatagaggtagttgtcaatggctgcttgtactcgtttccaggtgggttggctgttaggctcaaagacggcaaatcgcattgcccgcttgatgtctcgttccgctgcattaaataaacgtcgtactggaatgtagcgccagttgtctgttttatctaacgtacgggccccccaaattagcgtacctttgccgctaaaagcacggatggcattaataccggcttcattcatggtaccttgcttatcatctgtgatcggctcggatggtttggcattattcaatgccacattagcgggggctttccagacgccacgactggcatcggtcgccgcataaatacccgcaacagcggcgcttgggggtaaggtaattttagtggactttaatttgtcatcgacggcttttttagctttagtgtattcccctagagaagccgttttcagcttggctagagtttcaacaccgccatagccatctagcataatatcagcatctgctggttggctataagtaaaagaggtctctagattagggtaatagacagcggttttatccggttgagtagtgggtttattttccccatctgtactatcagcgagtaggaagtaacctactttttgctgtaataaggagtttactgcaccgtagaccttttgttttagtgttacatctgtttcagggcagaccaataaggtgatctcttgttgtttttcaatcaggtctggcagctttgctaattctgattcatctgtcgttatcaatggcaacagataacagactccaccaccatgactaaaatagtgctgtacagcaaaggcactgagagaagtggctgtgacggtagcggcgtaggtataggtttttgcggcatttccacccacatttgtagcctttactgatacggccggtgaaagtgaaaattgtgagataaaatccaaccaactggtgattctaatacagcttccctttgcaggttgattcccgtctttgtcaaaaaatttaccaataaagacgggaatggcggttggactattgctaattgatagcgatagtgaagcgtcctcttcaatataaacgcccggtgtggcataggttgcggaagtcatggggttttccttaaataggataagtatgtggtgatcttgaatcgattattcgccccattaagattgggcaacattttgggtaaattgcagaataataaattcagcaggacgaaccgcggccataccgactttgacaatcattctgccctgtttgatatcgtcatcggtcatggttatccctttaccgatttgaacaaagtaagcctgttccgctttgttaccggctaatcccccttgttgccagagggcataaagatagttatcgatcgcacgatgtaccgctttccaagtgggttgactgttaggttcgaataccgcgaaactcatggcatttttaatatctcgctctgcactattaaataggcggcgaaccgggatataacgccagttatcactatcatcaagtgtgcgagcgccccagacggtgacaccggtatttggaaattcacggatcatattgatggctttaccggtgttataggtaccttgcaaatcatcagtgactttaaatttcggtttcaccccgctttgtaatacaacatttgccggtgctttccagacacctcggctgttatcgacactggaataaataccggccatcacggcgctaggtggaatatcaacgctggctttattttctccccattcagcggtcagccaagggtaataaacggcggcaaaagggcttagctcataatcattttgggatgagccattagaatttaactctgtggttggaccatccagaatggcgaataatcctttgcccgattggcaaagtgtacttaccgcatttttgatatcttctccggcagcaaccagtaaggtgacatcatccagttttggaatttggtttgctaagtcgttggttttgacaagatagccatatccaccgccgttaataaaataggcacgcagtgaaatatcaagtttgtcgttagaattaaattgcccgctttttagtgtcaaatattccaaccaactattaattcggataaaaggatgttttgataataatgaattgctatttgcaaccgcaaaaacaggcactgccgttacactggaacgaacggagagtgatagtgaggcgtcctcttcaatataaacgccgggatgggttggtgttattggcatatattgcctccaattattgagcgatattttgcatgaatggtagaatgatgaattcagccgttattctggcgttttaggcggcctgaatcattactctatccgcagtgagttttatctcttgaactgcgatatcattgctggtggcatcaaaagaaggggaggttaatgacgttgggaacgcatttgccacgctccagctcattaaaatttcggtgccggcttcattggtcaggctaattgaaacatcttttttctcaacctgattaagctgaatggaattaagccagtcaaaaagtttagtatccccagggaatacccctttacgcagcgtaatattgatcaactgacgttggcccggcattttatagtgattaccggtaccatctttatattctattacatcataagtgatatctagccctgaaacgttgttgaaagggatttgttcatcaccaacggagacaacgaatcgataagttggtattggataatcaacagcaatttgttctgtagttacggacatagtttatttccttaggttggtaggtcagtgcggttatcgctttatttctcttggcatttagcgatagacaatagctaccgcactaacctgtttatataggaatgttactcggtgaatttaagatcacatgatgatcactttggattatagttaactcacgttattttcaaacatcaattattaatatttaaaattatcaatcaatgaaattatttaaatataaatcatttcataatcacattgttatatttttctatgaaaggatgaataaatagtgtgttataaattttgatatataaatgatgatgcgtttcagaaaagagttttattaacagaaggttatgtatgctttttttatcggatttaatttgtcagattattgtattttaataatgaggtatgggcaattaggttatcaatctgaatcaaattcttggcgttcaatctattgacaggtttcgtcctttttaaaacaaactacagcgattaagctgtagtttgacgcagaaaaggttcgattaagggaaatcaggccgtagggcgggcgacaatattacgcgtttccattctgacttcatcaatacgaacatcaataatatcgttcaattggtaagcgacttcacctttgataatcacagtaccggtctcttggctacattgcagttcatcacgcacggcatgcaggaagggtgctggtataaaggccactgcaccgttatcggccagtcggacacgtaaaccaccacgggtgatatcaatgatttctgcggtaaatcgttgttcggttcctgcgtgtggttgcaggaaccgggcatatagccaatcccccacatcacgttcggccatacgattcagtctgcgacgttcagccagttgtaaacaggtttcttctgagggctgttctacatcggttttttgaataatcgctttcagtaaacgatggttaatcatgtcgctgtatttacggatcggtgatgtccaggtggcgtaagcatcaaaaccgagaccaaaatgaggaccgggttcaggtttaatttctgcgaaagtctggaaacgacgaatgcgactatcaaggaattgtgttggttttttatccaattcacggcgtaatttacaaaagccatccagagtcaataattcttctgttttggcatcaatatcattttcttgcagtaattcaaccacttgttcgatttgcagtggctcaaaacccatatggacattgtaaataccaaagcctaacttatcgcgcaggatttttgcggcgcacaggttagaagtgatcatggcttcttcaacaatacggttggctgtacggcgttgttctaccacgatatccagtacgtaaccattctcatcgaggatgaagcgataatcaggacgatctttgaaaataagcgcattttggtggcgccattggttacggcgatcactcatttccttcaaaagcgtgatttgagtcttaatcgcttcggaagcgggttcccaagtcccggttttttccagccagtcagaaacttcgtcgtaaaccaatttagcttttgattcaacccaggtagagaaaaacgcaatatcatcacctagttgaccatcttccagaatagaaacctgacaaactaatgccggccggcgggcgttaggacgcagagagcataaattctctgacaggtcgcgtggcaacatggggatattaaaacccggcaggtagttagtgaaagcacgttgatgggcgatttgatccagctcgctgccagccgcaatataagcggttggatcagcaatggcgatactgagtttcaggctaccgtcatcttgcttagcaatatgcaaagcatcgtccatatcttctgtggttgcactgtcaatagtgacaaaatccagcgacgttaagtcaatacgctcaagatcgccatcgttcatctggcaatcggcagtcatcgcgggagcatcacgttccagattatggcgcgtgagtgttacccaccaaggggcgtagtgattgtcgctttcagtgatatagccggtaatttctgcatgaaaaccccggctgcctttcaatggatgatgacgcatttcagcgacggcccaatcaccatgctgaaatggatgagtgacctgattggtcggccggcaagggatagcatcttttagcagtgggtgatcaggagtgatccataaacggttgtcattttcttttttctggatacgaccgacgaagcgatttagaaatggttcaatcaatgtttctggctcggcgatctctctttctttatcagtatgaatagcggcagtcactcgatcgccatgcataacttttttcatgtgtgggggaggaatgaaataacttttttgcccatcgacttctaagaatccgaatcctttttcggtacctttgaccaaaccttctactcgaagtgtttgggaatgaagttgctgttttagctgtgcaagcagcgggttgttttgaaacataatatccgcggagaaagttgagggttattatcagatagttttttggaataacagttttacgcgaattgatggtgtcgagcaagcaacatctgcaaaatagcgtaaaacagtacgggaattgcaatgaaaattacaatagttactcagggtaaattttttctttaaattcacatagatcttcaataatacaggaaccacaacgaggtttacgggctatgcaggtataacgaccgtgcaaaataagccaatgatgacaatcaactttaaattcggccgggacaacttgcagtaatttattttcgacttcattgacatttttaccgggcgcgaattgagtacgattacaaacacgaaaaatatgggtatcgactgcaatagtcggccagccgaaagcggtatttaacaccacattggcggtcttgcggccaacacctggcaatgcctccaatgcagcacgatcttcgggaacttcgccagcatgtttttccagtaatatctggcaggttttaatggtattttccgctttggtgttatacagaccgatagtttttatatactctttcagcccatctacccccagatttagaattgcctgaggcgtatttgctactggatagagtttcgcagtggctttattaacactgacatctgttgcttgcgctgaaagcagtactgaaataagtaactcaaatggtgttgtgaaaactaattcagtggttggctttgggttgttatcccgtaaacgcgttaaaatttcgatacgtttctgcttgttcatatcaaatagaactctccgattctggtgacattgttattgcacggcttttttcttttattgctctcgttttcattttttcatcaataagatatttcactgccagcattaatcccaaaccgataaaagcgccgggtggtaagatggctaataggaaaggggaatccatatgaacgatttctattcgtaataccttagcccaattgcccagcagtaaatcagcgccatcaaatagggttccattgccgagaatttctctaatagcaccaagaacaaacagagcaaaagtggctcctaatcccattgctaagccatcaatcgcagagggcatgatcggatttttcgcggcataggcttcagcacggccgataacaatacagttagtcacaatcagtggaatgaaaatccccaatgattcatacagaccaaaagcgtaggcgttaatcaacatctggacagtactgacaaccgaagcgattatcataacataaatgggaatacggatctcattgggtacccaacgacgcaagctggaaaccgcaatgttggtacagactagaaccagtgtcgttgccagccctaagccgagcgcattggttgcagtggaagagacggctaacagggggcacaatcctagcagttgtactaaagcggaattgtttttccatagcccttggataaataaatttttggtttcactcatgatttttctccacaggattctagagaagagagatgttcaggtatggtctgtaaataaagtgcagtccgtttgactgagtttaccacggcgcgtggggtaatagtggcaccggtaaattgatcaaactcaccgccatcttttttcactgcccagtgctggtcatgatttgatgtgatggttttccctgaaaatacattaatccagtttgaaatccgggtttcaattttatcccctagccctggggtttcatgatgttctgtaacccgtacaccaagcacttttcctgagaaatctgcgccaaccagtaattggatagcaccggaataaccatccggtgcagtactttctagcgctgccgccacggggtgaccatttttacgggccagatagagacgatgaggcaagttattgcccagagcattcgcattaactagataacattcgttttgtatatcattgtcgtacagggcaggcggaataacctgatcaagcagcgacttgtgctgtagggcggcttgttctgcaatagtacttttggtgagtgaattcacgacagccgttagcccggtggtaagtgccgcaaaaatggcgagtgtgatgccgtgacgtcgcatggtttctaacataacggctccttatttatgcccgtaaacgcggggttgggtgtaatggtcaatgagtggcacggtgatattcgccaataagaccgcaaatgctatggcatcagggtaaccaccataaacacggataacccagactaacaggccaatcatggcaccaaaaaccaaacgacctttgggtgttgtggaagcactgacgggatcggttgcaataaagaatgcgcctagcatggttgcaccggaaaacagttgtaataatggcggcgaataacgggatggatcaatcaaccagctagtgagtgcacataaacctaataccaggataaatgccacaggaatttgccaggttatcacttttctgttcagtagaatcagcccaccaacaagataagcaatgttgacccattgccagccgatgccagccagagatccttgtaatataggttggtgaagaacgtcatcaatatggtgagtcaataaaccggttttgaaactatccagcggtgtagcttggctgatcccatcgaaaccttgttgcaattgctgcaatgttgttccatcgggagtctgaccggtgaagatcaccatcagactgtctagcggagtgatttgtgttgccagtaaatccatcggcggcaaccagccggtcatttgcactgggaatgatattagcagtacgacataaccgaccattgccggattgaatgggttttgaccaaggccaccatataaatgtttggcaataatcaccgcaaaagcagttcccaatacaatcagccaccaaggagccagcggtggaaggctgatccctaaaagtaaacctgtcagtaatgcagaattatcctgcaaacgaggcataattgcctgtttacgcagagatagggcaaatgattctgcaagcaaggcggtaatcactgcaagcaggagctggaacaaggtaccgtaactaaagaagtaagtttgtaccgcaataccggggattgctgccagcacaacccacagcataatgcggctggtactttgctgattgtgtgtaaaaggcgaacttgcgacttttagttttttattgtcagtctgaacgggtctgaatttcatttataacaatcactattctattgaaattttctgttgttcctgagcgtcttttttggccttaaccctagcaatagcggcagcgacagcagctttacgcggatcggtttcttccgctggcggtgtttctacctgggtttcagctaattgctctgtttgggcttttttggctttgacacgggcaatagcagctgcgacggcagctttacgtggatcagtttcttccgctggcggtgtttctgcctgagtttcagttaattgttgagtctgagctttcttggctttgacacgggcaatggcagccgcgacagcagctttacgcggatcggtttcttccgctggcggtgtttctgcctgagtttcagttaattgttgagtctgagctttcttggctttgacacgggcaatggcagccgcgacagcagctttacgcggatcggtttcttccgctggcggtgtttctgcctgagtttcagttaatggctgtgtttgggcttttttggctttaacacgggcaatggcagccgcgacagcagctttacgtggatcagtttcttccgctggcggtgtttctgcctgagtttcagttaatggctgtgtttgggcttttttggctttaacacgggcaatagcagccgcgacggcagctttacgtggatcagtttcttccgctggcggtgtttctgcctgagtttcagttaatggttgagtctgcgcttttttggctttgacacgggcaatagcggcagcgacggcatctttatgaagatcttgtttttcactagtagtagtttctggttctctcgcttccggtgatggtgtttctgactgattttgagctgctttcttcgctttagctctggcaattgctgctgctaatgcggctttgcgtggatcttctgcacttgttggttcagatggagtaatactcatattttccaccgcctgtttttccgcctgacgagcgcgaagctgctcttttcttgcctgacgagccgctattactgcggcattatcaggtagttgccccggttctatagcaacaactttacccgcgttagcctgtttttccttcacgcgggaaagcgcatcttgcacagcgctcttatctttattatcaacttgaacggccgattttttgtgtcgttcatctcgggccagtttttctcgttccatacgggcctgcttagcttcgaaacgaattttggcttcggttgaacggcggttttcctgatccaaggcccgaatttcggctttctcttggcgataatattgcaccagaggaatattgcttgggcagacataggcacaggcaccgcattcaatacagtcgaacagattgtgatctctggctttttcgtgctcttgcccacgactgaaccaatagagctgctgcggcaataaacgggcagggcaggcttccacacataatccacaacggatacaagcctcttccgttgtatttgaatccatttcctgatgggatggtgccagaatacagttactgatcttaacgatgggcacgttgaggtcaggcagcgtgaatcccattaagggaccacccataatgaccatctgttctgattgtggtgcaaaaccggctaactggagaagaaattgtaccggagtaccaagccgcgcccaaaagttacccggcgaggtgactgcttcgccggtaattgtgacgacgcgctcaattaaaggttctccatcaataatggcccgtttgattgcaaccactgtccccacgttctgcatcagtacaccgatagtagaggaacggccaccggaggggacttctttaccggtcagtatcttagtcagttgtttggcaccgccggaaggatatttggttgggataactcggacgataatcgatttatcgccctttagaacggttttgagtttttttatggctgctggtttattatcttcaataccaatcaggatctgctccggtttaagcagatgttccagaatacgaatgccctcaataagttcgttggcatgctcctgcatcaggcggtcatcagcggtgatataaggttcacattctgcggcattaatgatcagtgtcttaagaccatgacggccgctttgtagtttggctgcggtaggaaagccagctccacctaaacctgcgataccggcctgatggattcggttaagaatcgtatctgcatccagtgattgataatcaggtgtttgaatgcgttcaccccattgatctttcccatcagggcgcaaacgaacgcataactctttcaacccggatgggtgcgcggtaatacatggttcaatggcaatgatggttccggaagttgatgcatgaaccggtacggtacgacccgtgccaaatgttaagggctggcctttaagcacttcatcacccactttgaccagcaactcgccttccgtccccaaatgttgttgcaatgggatgattaactcttccggtagtggcgtaatgcgtaaagggctttggctggattgcagcttcatttcaggtggatgaataccgccggcgaaatcccagattttatttttattgagcaaattgaataaattaaacatggtgttcagcctcaatatttttgatcgggatacttttaatggaaatggcgtgagatggctgaacaggaatatttctaactggaatggtttttaaatcccatttccagttggaagtggttgttgctacagggatcatcgtaatacagtcggttggacaaggagcaacgcacaggtcacaaccagtacataaatcttcaacaatggtatgcatggcgcgggtagcaccgacgatagcgtctacaggacatgcttggatacatttagtgcaaccaatgcaattctcttcatcaataaaggcgactttgcgtgcagggttttgtaggtttgcatcaccatccaatggttgcggatcgataccgagcagctctgaaattttcagcatgacttgctcaccacccggtgcacatttgttaatcatctcgccattgttcgctacggcttcagcataagggcgacagcctgggtaaccgcattgtccacactggctttgcggcagaatatcatcaatgttttcaacaatggggtcctcttccacctgaaaccggcgggcagcaaaccctaggattaacccaaaaattaaccctagtgcactgagtgcaccaatagcaatccataacgatgtcatcagaatttcaccaaaccactaaagcccataaaagccaaggacattaaacccgcagtaataagaccaatagatgaccccttgaaaggggcgggtacatcagcaacagccagacgttcgcgaatagcggcaaacagtaccataacgagagagaaaccggcggcagcaccgaaaccatagatagcggattgtaaaaaatcgtgtgattgattgatattcagcagcgccacacccagtacagcacagttcgtcgtaatcaacggcaagaaaatacctaataaccggtataacgtcgggctggttttgcgtacaacaagctctgtgaattgcactacgaccgcaatgacaagaataaagctcagagtacgcaaatagattaagtccagtggtaatagaataaaagtattcaccagccatgaacatacagaggctagtgtcataacaaatgttgtcgcaaatcccatcccgatggcagtttccagctttttagatacgcccatgaaagggcataagccgaggaatttcaccaagacgaaattgttaaccaatacggttccgacaaataaaagaaaatagtcagtcattagctgtgcctgaaaatgagtttgtttactttttattaaattgtttactttttattaaattatcagtatgccctcgttttaccagggcaatctattgttaatgataacaaccaaagaaagttgaggttatcgatcttgtgtgaaagtcattttgactcgatgagagcgtttaatgtaggggacaaaaatagcggctgccaatagtggccatgctaatgcacgcaaagccatttgatcgggaataggggagaaagcgaaagttttcaatgcaattaatacggtaacaataagccaaataataaaaatgtggggaaatttttttgatcgaatgaaaagcagtttcaatacccatagggtgaaacaccacattaccgcagtaatggcgacagaaagaaaccacattaaagtaaagtgattattccctgcgctcaacatattgttttgactgaaaaatgtcataatatatagagcgagcattacactggcactgagaaaggtcataatcagataagctgccggagccagaacccaaccattaattcggtgataatcattggtttgatacataaatcattccatttgaagctatatgaaaaaagaataataggcgattcggatgggttaggaaatagattgattgaaaaatcttcaagggtagattcagagataatttgcgaaatggtcatcaccgatgatattttttacggatgctgaattgctgcatattattaatgagtttgagaggctgttatgcgtgagctgttaaaggttgggttggtggggtatggttatgcgagtaaaacgttccatgcaccattaattgctggcactgctggtgttaaattggccgctatttccagtagtgatgctgagaaagtgaaatcagattggccaaatatcccggtggtatcccgccctgaggatctttttaatgatcctgacattgatttaatcgttattccgacacctaatgatacgcattatcctctggcacagaaggcattggcagcgggtaagcatgtggtggtggataaaccatttactatcacagttgaacaagctgaatctttaaaacagcaggcagagaaggcggatttattactttctgtatttcataaccggcgttgggattctggttttctaacgataaaatcgttaattaaagagaatcgtctaggtaaattaaaatattttgcatctcattttgatcgttatcgcccgattatccgtcaaagatggcgtgaagcggcggggcaaggaagtggtatttggtatgatttaggccctcacttacttgatcaggcgattcaactgtttggtaaaccgcaatctattaccgctgatttgggaatgatccgtccacaagcggaagcggtagattatttccatgtactgctaaattatccagatatcaaagtagttcttcatgcaacaacactggcagcggctgaatctgctgtttataccttgcatggtatggcaggtagttacgtaaaatatggtcttgatcctcaggaagagcgattgaaagcgggggaaaggccgccacatgctgattggggatatgatattcgtgatggtattgtgacgctgtcacatggagaggaattagtgactaaacacgtgccgactctgcctggtaattattctgcttattatgcggctatccgtgatgcaattatgctcggtaaacctaatccagttacggcaaatgaagccattcaaattatgaaattaattgaggctggtattcagtcggcagaacaacaacgtacagtggcaatttaagcctatacccgtcatctttcaagttgcttctttgttggctgcactcgctcaccccggtcacatcgttatctatgctcccggggattcacttccttgccgtcgcgatgcatcttgaaatccatagggtatatattttgttgagactttttatttactacttagcctggcttgccgggcctattatttgaaatagcaaggaaaatgatcaatgacttggtggcaaaaattaaaaatagattcttttttgatgatattagtgacggtagttgttattgcgacattctttccttgtgagggggaaattaaagtctggtttcaacgattaaccacagcggctattgcgctgttattctttatgcatggtgctaaattatctcgtcaagccattattgccggcatggcacattggcggcttcatctggtggtctttctcagtacctttgttttattcccgattattggattagggttgaatttgctcgtaccggaaatcatgacatcaacagtttattggggatttctctatctttgtgcattaccggcaacggttcagtcagctattgcttttacctcagttgctggtggcaatgttgccgctgctatttgcagtgcttcggcgtccagtattctgggcgtatttttatcgccaatattagtcgggttgatgatccatacacaaggtgaaggcagcgctgatactctggaagccataaaagccataattctgcaattgatggttccctttattatcggacatctatcgcggccattgattgcccgttgggtagagaaacataaaaaactgcttaatatgactgaccggtcatcgattcttttggtggtttatgtggcttttagtgaggcggtggtagaaggtatttggcataagattgatggttattcactcctgacgattggggtggtttgctgtgttttattggcggttgtgttggttattaatacttatattgctcgttggttgggttttaataaagaagacgaaattacgattgttttttgtggttcgaagaagagtctggctaatggtgtgccaatggcaaatgttttattccctgcggcgacggttggcgtaatgttgttgccgttgatgatttttcatcaaattcagttgatggtgtgtgcagtattggcgcaacgttatgccaaaaggttaaaatagaaataggtataaatctatgatagggaattgttgtaaatatatgtttatacccgtcatctttcaagttgcttctttgttggctgcactcactcaccccgatcacatagttatctatgctcccggggattcgctcccttgccgccgcgatgcatcttgaaatccatagggtatatatattaatgatatttacaacaatgtaatatttgactacgaaatttaaatcgtaaacttctatttgaattttatatttccccaatgaatacaattttatattttaaatagttttctttagaagtctaaatctttgattaagatcactaaaatagtcgttatgatggattttttaaatctatacttaatttgttgtggtatatattggaacattgttaaattagacctagataaatctacgttaatattactcaaggtgatgatatgattattgttaaaaattcttcaaataaggtgactaaagtttcaattaataagtgggggaaagatggtaatacaggttattgggatattaatccgggagatacagcgagttggaatcgcactgatggtcgtggttttgtaatgtcaataatacgtgagaatgaggaccaaaagtcatattttgtcttagcaaatagcaacattgttatttatgataaagatgctactggttacggtaaaaatgttcaggataatggtcgttggatatatcctttaaattgaatcatgagaaaaaacttatcatttttattgtcatcctaaaatcatctcctagggaggtggtcttttacattcagcttagtattcaatttaactggatattatattccaaatatataaccacaatcaggaatagaatcttcacgcgaaacattgggtatgagttgtgctagtaagttgtaagcaaatcattagcctaactaaaattgattgtgactaatgggattgtacttttaaagttccgtactggatttgcgctatacgtatagtcaaacgatttttattatcaaagttagcaagaacacgacctaaagagacattttataacactctagagctattacgttttgctaaacagttcgataatcgtttagataacttctttgacattcatccagagtttgtatctaagatcgttattgtgagcgatagtcgttcatgtattgataaaattaaaaaacatctaatgtaacgtgaataaaactagttttataactctctctcaccatgtcacggcgtttactgcgccgcgtgtttcactcgcaaaatttcgacggtgcgcgcctcgtccagcacgcgataaaaaataatgtagttccgatgcgcgaccagctcgcgcacataatccggcaggccgggccgcccggtgcggccaagctccgggtgctgcgcaagcggcaaggtcttgtcgcgtagctcctgaccgaagctgcccgccctggtcgggttgtctttgcctatgtatcgaacaatggcgcgcaaatcctcgcgggccttcggtcgccactcgatgcggtaaggggtctttgccttcgccataaatcagccagccgcgctcaagcgcgcttccttttggcgggcttgtgttcggcggccaaggcggcaatatcggcgtccatctcggccataacctcatcgtgtgaaagattcgggcgcgggtcgtcgatagcatcctgaatctcggcggccagccactccgagtaggcggcggcttggtgggccttgcgcattgcctcggcccggccacgattgccggcggtttcttctttctcgtccgggttccactcactggcgtcgaactggccgatggtgatgcctacgccgcgcaacacgttcagggcggcaatggggttgccgaaacggcgcggctcttggctgcgggccttcgccagcacagcggcggcaccgctgcgggttgcgatctgcacaaggaaggttccgccttgccctttcagggtcacaccttccacgccgccggcatcgcttgcggcgcgtagctgctcaatggtcatgctttgcatgattaactccttatagggtgatgaaagtaacagggttgattgtgcatattttctaggaaacgcgcaagcacctagacaaatcggtggtactgaccttcgtctttctcggccgttctttaagagctggcttcaggctttttttccgactgctgcccggtcttcattgacggctttatgcagtgcgtcaaaataggtgccggggggcacagcacgttgttcactctttgatttgtgcggattgcaaggttgtcccatgccattattcttttcttacaaactgttttgattctatttttgatgtatattatcatcaatatgtgaatcaaggaggttatattatgcgaactactgtcacgattgatgatgcgttgtatgcacaggcactagaaatggccgatcctggcatggataaggctgatattttccgtgaagcggtgaaaacgtttgttcgggtgcaggcagcaaaaagactggcttcgctcggcagcacatcacctgatatgcagatagttccccgtcgccgggaggagccatccgcataatgactattttagtagatacgtccgtctggattgaccatttcaaaaacaggaatgacggattgatccagttgttaagccgggatctggttctgattcatccgatgatactggctgaaatagcctgtggtactcctctggcaccaagactgcgaacgcttggagatctggggctgttaccacagagtcatcaggccactatcatcgaggtaatggcattcattgaaaacgaaaagttgtacggcctcggatgtggtctggttgatattacattgctggcatcaaccttgataacaccaggggcaaggctttggacgctggataaacgacttgagaagttggctaaacgtcttaatgcgagttatcagccgattcattgacagaatttaaaccgctctggaaaccaccagaaaaccggccggttttctggtggttttctcattctcaggaagggtgggcgggcaaatcagtaatgtggtttgattctcagataaagtgatttggaacggcttttcattctcacgcaatgtggttcagaaaagggcatttattgcgcatcggggcaatcatcattgcgcgtcactacagctaggagctgggaaataccgcgcattgcgcactgtagatgtcagtttgtacaaaaaatagtcttcgtgggatattttgtgtgccgtgcaaaggctcggcctttgagaccatagatttttatgctctacaaaggaaatcgctgataagatttcttcaaaggcttagaccatctgattatgcttcaaatgatgggaaatgatgaaatcacacagctatgttcgtcagtcatggcgctgttctggtgttcctgctgtgtattttcctagtctactggcgcggggtagcactgctgccagcagtgggcctgctacgcttctgggataaaaagttatatatttatttaactttttagtgttgccgcctggtttatttccctgttggatgttatatttatatataacttttatggaggtgaaatatgcataccactcgtctgaagagagtcggcggttccgttatgctgaccgttccgccggcgctgctgaacgcactgtctctgggatcagataatgaagtcggcatggtcattgataatggtcggctgatagtggagccgcacaagcgcccacaatattcgcttgctgaactgctggcacagtgcgatccggatgccgaaatcagtgcagaagatcgtgaatggctggacgcgccagctgcaggccgggaggcaatctgatatggagagaggggaaatctggcttgtctcactcgaccctaccgcaggccatgagcagcagggaacgctgccggtgctgattgtcacgccagcggcctttaaccgcgtgacccgcctgcctgtagtggtacccgttaccagcggtggtaattttgtccgtaccgctggttttgcagtatcgctggacggtgccggtacacgtacaaccggcgttgtgcgctgcgatcagccgcgcacaattgacatgggcgcacggggcggaaagcggcttgagcgtgtgcctgcaaaaatcatggatgacgttctggcccgactgaccgtaattcttagttgaatcaataacgtgaatatgttgccggcattgcctgttcctgaatagctgcaatatactgtatgtataaacaatgttaggaggctaattttatggcgctggcgttagtttatcccctgccttctgatgaaggcgactcattacctttctttgccgagtccgttgcggccggtttcccaagcccggcagccggctatgaagctaatgaactcaaccagcctgcggaaatcagtaaattgcctcaaatagacgcgttaagagcaaaaggtatacctttatggataccgatcatcctatcggccacagcccgatcacaataggttccagttccggtgaatcaaggttgagccgacttaattggctattaaccttgggccggttgaatctgacggcatcaagcgcctcaaccaatggacggatctctccgaccgtggtcgtatcatcagcatgaataatcgcgtcaagcaatgccagtgtcttatcagtttcatcggctaacgtcgcgccgggcattctgtttccggccagacaaaaaggagacttcaggtgagaattttcgagaatcgtttcaatacggatatcgtgaagccagtgctcgaaaaagttgtactcgtaggtaaaacggtcaccggcatcaaattcaaagtcacccagcgtaattttgtaggggttatcaggaaatccgatcccgccggagtaggaaatgccgtaatttttgccctaaatacggaattgatgcagatgatcatcctgccatccctgcacgatctgaatgatatagtgcaaagccgctaaagaagtctcgcctgacaatctgaatcggtaccagaccattgggctgatacctcggagggctactttcacaatataagatttcatggggaggtgtctgatagaatgatgttcctttgctcattctatcgttgatttaacaccgtgcaccacagatttttatggtctcgataatcaggaatgggagattccattcctgagctatttatgtttaacgatttgctgctttcatgcgtaatgcctgtttttctgtatcactgataaaagcagtttccagcccatttatctgagcctgacgaatttgagcaatagataaacccgcggcaggggcggcaatttcatattcatggcggatgtcgatgccttcaacggctggatcatcggtattaatggaagcaagaatatctttttccaggaattgtttgagtggatggtccaataaagaattgacggtgctggtttgaaggtttgaggttaaacaggtttcaataccaatacggttttcaaccaaataatccatcaatacgggatcagtaatggcttttaccccatgaccaatacgcgtggctcctaattccctaatggcttgccaaatactttcagcgccagcggcttcgccggcatggatagttatatgccatccagcatcacgggctttggtaaaatgagattggaaaagatggccgggaaaacctaactcgtcacccgcgagatccaatgcagtaatatgttgctggtgagctagcaggctagttaattcctgagtacaggcttgttcaccaaaagttctgcttaaaattccaataagacggatgtcgatatcgttattttgacgggcagaacggataccatcaataattgcctcaacgaccccttcaaccggcaatttgtggttcatcgccatgtaataaggggaaaaacgtaattcagcatagtcgagcccagtattgatggcatcttcaacattttcaatagcaatacgacgacaagcgtccaaatcagctagtactgccactccccaatcaagtttttgtaaaaaactgactaagctcggttcattttcaataatttgtacgtgggggagtagtgattccagatcatttgctggaagctgaatattatgctggttggcaagatctaagatagtctccggccggatatttccatcgagatggcggtgtaaatctgtcagtgggagttttatgtcaatcacgttcaggtccttttttatataaaaatgccagtcacatgcgttgactggcaatttaacaaaacgtttatcggcgcgttttattgcgcaggttgcacagtaccttctgctttcacttttccactgtcgtgggtgtcgccttctggcactatttgttctggtgcttcatcatcagaagggtcggataaattgtattcagacatgaattgatgtaagggcattttcttaccattcatttctacattaccgtctgcatagttaaacttaatgctgatagcatctttatcaaccgtggcaattttaaacagttgtcctagttgttcaaactgttttatctgttgctcagcattatgttcagcctttgctttatccatgccattcattatcattgactgagtggaaaactcaatcatcataggtcttggtaatgtgacattcagagacatgttctgaattaaggtgcgaatagcttcctctgttttcattgaagacaagctacttttatcttttggtaagtccttcaaactcacttggtaattaatggtactttcacctttggtattcttccaggtcaatggatcaataccaaattgtggattgtttttcagcaaaataggcaggttagacaataccgcatcaataatagctgtatctgctgcatcggaagagatatcatcagaagagagtgatttggctgtggcatcattgtaagcttgagtaaacttacgcatggcttcaccatccagacgatcggcagtaattgcaaactgaccagaaccaaaatcaatatttttcagtttaaggccatccaaactataagtgatttttcctttcagattagtttcatcttcaccgatatttgaatctattttaacgccggaaagcatcatatcttcattgccgatgccttttaggctgatttgctgaattttgatgctttgatcgccaatatagatatcaaatttgccttttttattgtctaggtttaaatcaatacctttgacaaggaaattttcgtcatttttattgatggttaactggtcgctcttgattgccagtgatatctttttcagatcacggctgagatcggaagtcagtttggcaccggaaaaattgaatttagcaccatttttttcaaaatcgacaggaatgatatcaacatcagaaataacagaaccactataactgacacgggaatcagaagtgaacagcgattttcctttagtgatttcaaacaggggttttaaagattcattattttccagttcggaatgaacggaagccatactcggaattaaggttaattttttcacttgtgcaagtgggaaagggccgtgatcaatcacagatttaattgaaatttcttcaccgggtttgatttctgcgtttttaacgccgtctttaactgtcagaacaagacggacatcagaactgaacacgccacggcggaaatctttactctgtagcatcagacctgtttcagggaaggcttttttcatctcagcattggcgtgggaaatagattgatctatacgttgttcaatctgtttacctgtataccatgaagctccagtccaggctgctcccaaggcaacaataatgcctactgccactaacgattttttcataatgcaaatccgtccttttaatgcatattttgcaggtaatatgcattctctcgatataaaaatggccgttaacacagcttggagtgtaagtagtgcttaacagcgcctgtgaataagttttaggcccaggttggtattattaattaaaaacccgggcggtaaaaccatcaccgtgaattatcacagccttttcggcagcagatatgaatactgactcacctgggaaaattctcaattggtgttcgccagattgtataactgtttgaccttcaacacaaaaaacaatcgatgctgaattgttatcaagcgtaattgactgttccgatagagaataaatagaaaatgcaaaatcatccactggaatagggaaatttttagcgattttttcctgccttggtagcataaataaggtgtttgttggttttgaaacaaagtcaaggtttgccattagctcaggaatatcaatatatttgttggttaagcccgctcgtaggacattatctgaatttgccatcacttcaagagcaacgccttccagataagcatgaggcgtacgggcgcatagaaacatggcttgaccgggttcaagttcgatgacattaagtaaaagtggaataaatagaccattgtcgtcagggtaaaatgccgtcatttttttgatggaatcccaaggttctccgagccgactattcaatgctgatttcaatacgccaagagctagctgcttttgtttaccactcatattcagtaattgggaaaataagcaggcaagattctgttcatttggtgtctgaataaagaacggaattttgggatgggccgcagtaataaatttcagtaattgtgcgatttcgtttaatggacggaacccattcattgcccggaaaggggtaagggcataaaccaattcgggcttatggttatcatctttgtaatttctttccggggaatccaacggaataccggcgatattctctttggcaaacccctcttctgcggattttttatcaggatgaacctgaattgagagaggttgagccgcacacaataccttaaataggaaaggcaaacggtgaaagctatctgaaacttttttccccagatatttttccggatcactggctattaattcatttaaggcaatgggttttcccgtttctgggttggctacaagtgaactgcttttaggatgggtgcccatccataattcagccattggcagattatctggattttcaacaccataaatatccatcagggcggttttgcttccccatgaatagtgctggatctgatttatcatcttcaacatggccgttactctctttttaaaaaaatcaatctatttcctttctaccacaatacgataaatacgacttggttggcataatcaggaactaatatgtggcatgataacagaatgctaatcagtttatctgcaaagactgattataccctatggattttaagatgcttcgcgacggcaagggagcgaatccccgggagcataggtaactatgtgacgggggtgagcgagtgcagccaacaaagaggcaacttgaaagatgacgggtatatgcatattcgattattctgtgtgttaaggagagatagtaatggcagccactcgcattgaaaaagactcaatggggcccatcgaagtacctgctgaccaattgtggggagcgcaaactcaacgttcacttgagcattttcgcatttcgcaggagaaaatgccggttgcattaattcatgctctggcattgactaaacaggctgcggccagtgtcaatatggatttgggtcttctgccgcaagaacgtggtgaagcaattattgctgctgcgaaagaggtgctggaaggtaaacatccgacagaatttcctcttgctatctggcagaccggttcaggaacacaaagtaacatgaacatgaacgaagtgttggcgaaccgtggtagcgagatccttggcggggtgagggggagtgaacgccttatccatcctaacgatgatgtcaataaaagtcagagttctaacgatgttttcccaacagcaatgcatgttgctgcggttattgcgctgagtgagcatcttattcctgagctgaaaatattacaaaaaacattggctgataaagctgaagcttataaggatatcgttaaaattggccgtacacacttgcaagatgcgacgccattgacccttggtcaggaaatttctggctgggcggcaatgttaacgcataacctgaaacacattgaagacagtattccccatgtttgtgaattggcactagggggaactgcggttggcaccggtttaaatactcatcctgaatatgctgttcgtgttgctaagaaattggctgaactgaccaaccattcgtttgttactgccccaaataaatttgaagccctggcgacttgtgatgctctggttcattctcatggggcattaaaaggtctggctgcatccataatgaaaattgcaaacgatgttcgttggttggcttccggccctcgctgtggtatcggtgaaatttcaattcctgaaaatgaaccgggtagctcaatcatgccaggtaaagttaacccaactcagtgtgaagcagtgacgatgctttgtgcacaggtgatgggcaatgatgttgctattaatattggtggggcatcaggcaactttgagctaaatgtgtttcgcccaatggtgattaataacttcctgcaatctgttcgcttgttggctgatggtatgcgtagcttcaatgaacattgtgcagtcggtatcgaacccaaccgtgatcgcattactcagttgctgaatgaatctctgatgttagtaacggcgctgaatacacatattggttatgacaaagctgcagaaattgctaagaaagcccataaagaagggctgacattaaaacaatcggcgatgaaactgggttatctgacagaagctgagtttgatgagtgggttcgtccagaagatatggttggcagcttgaagtagttgttgcttagccatgaaaaattgaccggagacgagtgctccggttttttgtttcacgatctttaaattatttttttgcctttactaaacgggaatcaatgccaaaatccaagcgtttaaccgtgtttatatatttatgaaaatctttcgccataggattcaaaatgacgttattttcgtaggggacaatggcagagggaactaccaggccaatagaatgactaacctcgaaccattcactgcctatttccattgtgcaagtagaaggtacgggagcattccaatcagaaggtaatgtatcaatgtctaaaatatcaatttggttttcagggatgtcgatacttaacaaagcaaaatcagtgagaagttcatcatctccgacatgaacaagtacttctagcacagcaagagaaactgaagtggctacataaactgcgggtcttcctatattgtgccaacggccaccatataactttgctcctgtaccactccatgctgattcgacatattttgaacgggtaagtcggtataagatcacgatacaattccgtgttcaatcctgccgatgagattcatgacatctagcgctccactttctgtatcgagcattgattcaggcgttacgtatcctaaaccccggataggtcgcttcatccattgagctgctttatctttgtcaccattaaataaatctacagcatggtccatgacacgtacaaaccgagcaatgcgctgactttcatcagcagtaaatttacctttacctgaacagcgtcttgaataactgcgtatttggatacctgcaatccgcaaaatatcccctttaccgaacgttgaccagttttgtattttatcaactatagtgactggtaacccttcatttaatattgcattcaaatgtggcccactgcttgatgggaaaccaactgttcgccaaagtgggttactctggactttgtggcttggtgtaaaaactcgcataagcacctcttttatcatttgtcactattataatagacagttgaccaaacttggtcaaataagcaacatgcactaaatctcacgatataaatgtagccttggaataatcaattctagtggtttagctttgggtttatagcgatgcactatggcattggcatcatagttagcaagtctacctatctttggttggttatcgccatagttaacataaaatgcaattattggcaggggacaagcatattgcacctgtttttgttgttccgcataccagactcgtgcaatgggctgcactttcactgggcgtttgatttttaacaccacatcgtccggtaatttttttatatcgataatttcttttgcgaccaatgctgcccattgttcacgagaatagggggaaactgcacgtccagagttatagcttttctccaaacgttgcagaatttgatcttttgtgactttattgatgatatttttatttgcccaaccaaaacgaactgaatcgggattgagaaggggagtgatggttctgtaagcgtttaaagttatcaaaccatgtaactgactgtgaacaaactcaaaccgctgctctttatccacccctgattgcaccgttacgatatgttcaagctctgctttcaacttattaatttcctcaatcaaaagtaaagcagaacgatattgttgttggttcacagaaaaacataatacaccgggaagacgaacggcagctttactgctgatattttggttattgtgatatataaatagcttctggtaatgacttaatcctatatttcgtgcgtcattacccgtcatttcattcacaatgatttctgttactggctcatgttcacagcctttttctacatcaggcaaaataaacacatgagcggccaacaaagaatagctatttaattgttcatacagttgcttcaacttactctcttgttgttgaaaacaactattcaaatcgtcaattgataaatatttactcatttgaataacacaattagttacaacatactttttattataaaacaaaaagtgaaaacatcaaactcaaacgttgtattcaaaagcaaaacaggtacacatggtaagcttgaacacgccaaagggaaaattaaaaggttttttgacttccctaataggctccgttcgttatccttgtgaaaaactgttaaaattttactggaaacatcgggaaatagagataggttttagtgaattaaaaaggcaacagctcagaagctatgggagattttgattcacctataatttgataagaaaagaaatgttagccatagcgggaatagctgaagtattaccaacaaggataaatctcattgctgtattaaaccgaattgaataatctcaaatccgttattgtgaattaaataccagaagacggttacctctcaaattgaaaaagatgaagaaataaataacgtttcataattctgctacacatgaccttcttcaacccattgttatacatagaattatgagtagtataagatgtagcgctatttgggaatattatttatataaatatgcttatcctacccaaaaagaaaaatcgttgaaattaccttttatgaagacagatttttactgtcgcctttgtgccatacgccacacaaactccttgaatattaaaataaacaataaaagttataatatccttgagtcgaaattcatggttggattgtagatgtcatttattattgtgcttcattaaaggcacaataattaaaacgtctacctaaatgaatgtgaatacaatgaataccacataaactaacgaagaatgattatgggaatactcacaggcagcgatactccgatcccaggaaaatcttatattattcatccgtatccagcaggtgattacgcgactgctgtaacggtagctagtatatttcatgcagcgccggggagcgtgtcattggcaatatgggaaagcactgtaccataccaaaaatttgagtgcgtcggggatggaaaggggagaggctaccttggctttatttgccgggcatcccctgtaagtgatcgcggggcttaccttggctacaacgctcacgaaatacttatctgtaaagctcagtaccaacaaaaatgggaagatatggttgttgttgagcgtccggctggaggattcgagtggtgcatgagaaaggatgaccatcttgcattcgttggaattcagggccacatacagctaaagatatttagagactttaccacgacgtggggcttcaccgagtggttctgatctctaaatccaacacttaactactggcgttgttttaatatttatttccggcactgtggcaacccggggaaccgggttaccaagatccggattagtgaaaataaccagttttttgtttctttgtacgtaattacgaatgtggctgcgttttctttccaccaatccaagtttcacagactccgattttgctctgggccaatggctgaaccggtcgtatcgcattttctgttaactgcctaaagttgattaacttgtcgttactgtcacaaaacagaagatatgaaagttgtgggcatccgtgatgttattttccgaagacgattgcaccggattgttagagttgagagggatcatctaggagccggaaatttctagttgtaacggttcgtaattaaaaacagtctggctcgtgctcgtatttacccggttttttggtattctgattatgttaataatgtgtaaataaatttaatattatataaggaaggggtgatgaaacgaaaaacggggtttttctttgatgaacattgtttttggcatagtactggcatgcatgtaatgactctacctgtcggtggttgggttcagccttcttctggaactgcacatgctgaatcgccggaaacaaaacggcggttaaaaaatttgatggatgtatcaggcttgagccactctttacacctttcttcggcatcgcctattgatgagcaaacactacgtaaaattcatcctgaagagtacttgaagcagtttaagcgagtcagtgataacggtggaggaatgcttggtatagaagcctctctaggaccgggaagctatgaaattgctaagctttcagccagccttgcttgtgcggcggtggaagcagtgcttagtggtgagcttgataatgcttacagcctttctcgaccaccgggtcatcactgtttgcctgataaacctatgggattttgttttctagcaaatatcccattggcaattgaacaggcaaaagcacgttttgatttaaaacgagttgcggtcattgattgggatgttcatcacggtaatggtactcaacatatttattgggatcgttctgatgttttgactatctcgatacatcaggatggttgtttccctccaggatacagcggtgaagatgatatcggggaaggtgaaggaaccggttataacctgaatatcccattacttgctggagccggacataatagctatatctatgcaatgacacagatagtacttcctgcgcttgaacgctttaaaccagaactgattattgtcgcctgtggctatgatgcgaatgcgatggaccctttggcaaggatgcagctccatagtgaaagttttcgggagatgacccagctagtgcaacaagcagcagatagtttatgcgacggaaaactagtcgttgttcatgaaggcgggtatgcggaatcttatgtcccattctgtggattagctgtacttgaacagatgagcggcattcgtacagaagtcaaagatccaatgttagattctatacgcttgcagcagccaagagctgagtttgagctatttcaacaacagcagcttgataaacttaaagaaaaattcggtctttaagctttgttgcataggtttgctccatgctccacatagtttggaagcaaacctattaaagtctcaccttcataacatatcaacgacacgtcaataaaatttatagaaaataactgagttcaataaatggaaaaaaagtccgataaacaggaacagcatgaggctgttcccgataatagttatgttatacccgtcccattgggtatataagatgtaccaaatatcaagcagggctaattgttgtgtcaattacttggtaaaatgcatttagggtatctgagattgtccaaacacccagtataacgtgatagccttgataaccctctggtaaggtacatttattaataactctgctgctcggcattttttcctgataatcctcaaagcagaaaggtgtactattaaattgctctctggttaaaggtttattgggatcccaaccaagtttggtaataaaatattcccaacttgaggttttgtgttgaatcataatttcccactggaactcaatctcaccggcagtaatagggatttttttccaacgatcttcggtttgagcatccaatgcgccaaaatgaccaatgccagcgctggcaatatgaccatcttccgggccagcttgtggaaagcctttcttagcttcaagagattgaggctcatacttaaccaacccacaatccatattttgttcatttccttgtgcggaacaaaggaatgcacgacttcctgggctatcaatataaccatgagcccatgtaccattagataaagctgtaattatcgtagcggctaaagccatcactttcactttatgtttatacataatagcgtcctccactttgcaggataatttatctacgacaaataaagccccaggacttaactatcaattctagataaatataatatgattatccatttcataaattgattaacaatttaattatattaagttattgaaattttgtttaaaatatgcctgttactattttttgtaatataaaaggagattatcatgcagagtaatattttggtcacaggtggtaagggaaaaaccggaaggttgattagtgagttactgacccaaaatgggatcacgcatcggatcggtacccgcacccctgaatcaagtaatgaaattgcctttgactggatgcgccctgatctggctgaagccgcattttctggcatcaggtcactatatattgtggcaccaacgaacaccagtgatcatggctcagtagtaccaccattgcttgaaatagcgctagaaaaaggggttcaacgttttgtgttgctcagtgcatcgtcactggcctctggtgcaccaatgatgggaaaaattcacgcctggctggaagctaatgcgccagaatggacagtgttacgtcctacctggtttatgcagaacttctatgaacaacggcatttggtaacaataaatgaagaaaatgctatctactctgcaacgggcgatggcaaagtggggttcattgacgctcttgatattgctcaggcagctgtttctgcgttaacatcaaatctaaccataaataaagatttcatccttacagggcccgaaacactgagttatggcgatattgcttctgcactgagtaaagccttaggccgcgaaattagtcaccgaaatctaacgaccaacgaattggccagtcggctacaacaaaatggactggatgaaacctactcaaaaatcctttcagcaatggatagtgacattgcatcaggtactgaagaccgcattacagatggcgtcaaagcattaacaggtgtaaatccttgttcactggatatctttattcagcgggaatgtcctcgctggagataataattaaccaatatattacggtttaaaacaaccaatctgctcaaaaccgtaatatctacttaaatgctacaataatatgttattaatgtttaataacataaagatcttttgtcgatacgaaacccaatggactcatataatacccaccaatataaggtttgactaatctaacaccgatatagtaataaacgggaattgctggtacatcttttgccaaaatgtcttctgcttgctgaaaatattttcgatcatttgttgctttagctttatttatcaaattatcataagcatgattgctatataagaatgtattattagaactatcagtaacaaaattatttaaaaacgaggcaggattatcgtaatcagcgatccgtgcatatctcaccatctcaaaattaccttgatgaataacatctaacatagcttttcgttcttggttctgcaaagtaatatctacatccagactttttttccacattgaagtcgccgcaatagcaattcgtttatgctcttctgatgtattataaagaagtttaaatttcaatggattatctctattataacccgcttcatttaataatttcctagctttctcaattcttgcttgttgtgtccatgatgcataatcaggttgccctaaattcactcctccagtatttggtggggtatgattataagcaggttcttggccttgccccaaaactttattcgctataatctctttatctaaagccaaatttaatgcctgtctgactctgaaatcattaaaaggtgctttttgattattaagatcataataataaacacctaatgctggtgtgatatgaacttgattacctaattttgcctttaaggatttaaataaaatcgacgggatattcttggtgatatcaatttctccggctagataacgattaatatctgccgtttctgatgctattggaaggtaagtgactttattgataacagtatgagcactatcccaatattgtgaattcctgacacccacaactttctcattgacaacccattcggacaacttaaatggcccactactgacaaatacatcgggatgagtccatttttcgccatacttttcaaccgctttttggctaataggcaccataacagggtaggccaacatcggtaaaaaataggatacgggttgttctaacgtcacttccaaagtcaaattatccagtgcttttacacctaattcatcagtttttttcttaccagcaacaatatctttggcattgactacgtgcatgtttccaagataactgccatacggagacgcaattttgggatcaactaaacgtcgccagctaaaaaccacatcatgagcagtaataggggagccatcagaccaccttattccttttcttagatgaaataaccacactttattatttttggtttcccaactgaccgctaaatcagggatgatttttccatcactgccagctctgattaatccactaaaaaaatcatgaacaatattaaactcaacatcattttcaactttatgaacatcaagagacacaggttccgaaccattattgcgaacgatatcttgattaactgacaataatgtacctgctggaataattgcggcatgagataatgccagattgaaaaatataatacctgtgaataaggatatattccttaatgttttattcatcatttgttctccaagaggatctcattttggggtagctatttcagggaaatcaattatttgataattaaggtttttatttaatcttgcaaaccaaacctcagaatgtttatgattatttaagatattaagtgattctattgaataccctattttgaatgtaagaggtataactataattaagtattagcataaaatacttagtgctacttcatcaatcatgagcttacagtaccaagtggaataattgctgcatgagataatgtcaagcctctaaatataattcctgcgaataaagatatattttttattgtcttttccatcgtaatttctccaataagacttcgctttttaatattgatgttgcaaattgggcaatctttgatattagctcgattgtaaataatcctgccgaggaataacccccgaatcttttcttccagtaaaaaaaatcctcgatcctgctcacagatcggccggtatattttcctgaacaggagtgtcgaaagttacatctatgtctttaattactcttttatttttgttttttagttgaaaaattaacatctacataacaattgaacatactaagttataggttatattttatgttatccaatccatcaggaggtaaccatgccggtaccaacgctcaggcatttcattaatagtcagtatgttgaatctaaaagttccgaatattttgacctaataagcccggtcacgggtgaaacctatgcgcgttctcctaacgcgactatagcggatgttaatgaagcttatgcatcggctaaagaggcattcaagatctgggggcgcagcacaccgtcagcacgtcagcaagcgttgctggcattagccgatgcggtagaaaaaaactctgaacgtctgatcgaagcgcaaagccgcaataccgggcagctcaagcatctgattgcctctgaggaagttgcggcgtcagtggatcatattcgtttcttcgcgggtgccgcccgttttctggaaggcaaagcgacggctgaatatcttcctgatatgacgaccagtattcggcgcgaaccactcggcgtggtggggcaagttacgccgtggaactacccgctgatgatggcagtatggaagatagcgcctgcgttagccgcgggtaataccgtggtactcaaaccgagcgataccacgccggaaagtactctgttgctggctgaactggccgctccgttcttcccgacaggtgcattcaacgtggtgttgggtaatgccagcgcgggggcgctggtcgtttcacacaaaacgccagctatggtttccatcacgggttccgtgcgcgcaggtttgcaggttgcctcttcggcggcagctaatctcaccagagcacatttggagctaggtggcaaagcgccagtggttgttttcgccgatgcagatatggacaaagcggtggagaccattgctaccgcagggtatttcaatgcgggtcaggattgtacggcagcctcgcgtgtgttggtgcatgaatctgtttacgataccttcgtcgctaaactggtggcggcagctaaagctacccgctttggctacccggaagatgaagaggcgctatatgggccgctcaataatgctcgtcagctggagcaggtcaaagggttcattgcacgtttgcccgcgcatgcctgtattgaaaccgggggccgtcaggctgagcgctcgggttattactttgaacctacggtaattaccggtctggaacagcacgacgaagcaatccagaccgagattttcggcccggttatcacggtgcagaagttccgcgatgaacaggatgccatagagaaagctaacgacgtgaaatacggactagcctccagtgtctggacccgcgatcatggccgcgcgttgcgcctgtcacgtgaactcgattttggtaccgtctggattaacacccatattccgcttacggcagaagcgccgcacggcggcttcaagagctcaggatatggtaaagatctgtcggcttatggcttcgatgaatatacgcgtatcaaacacgtgatgagttccaacgactgacacaggacatccgtaatgattcagaatagatctccacgcgacttggtgtcgcgtgcgcaccacgaactgtttactgaccgtgatgtaggggcacttgatcgttattttgcgccgcatttcatcgaacattccccgttggttaaagagggtcttgccggattgcgtgagctggtctggacacatcctaaactgcaccacgaaacgtatcgtgtattgcaggatggtgatctggtcgccatccacggtcgttttacgggattagacgactggccgttggtcggtttcgatctgtaccgggttgccgacggcttaatcgtagagcactgggacggcctggtgccgcaggctgcacccaacgtcagtggccggactcagttagacggcccgactgaagcaggcgatgaccatgaccgagagaagaatcgcgaactggtggtcaacttttttacacgtaccctgatcgagggtcactacgaagagtttggaaactacactaatggtgaattgtttcgccagcacagccccgatattcccgatggtacggcggcagttatctcgtttcttgagcaactcagagatgaagggcaggggctgcattacactaaaattcaccgtacggtagccgatgggcagtttgttctgactcattcggaagggagtattgccggagcgcgtcatagttacttcgagctatggcgcattgaggacggcaaagtggctgaactttgggatgctatcaccccggtaccggaggatgcgaaagcgctgcatcgccacggtattttttagcgttgatcgatacccggcgcgaagcttgtggtcgcgccgctaccggatgcccatacacaggcagatatgcgctcatcgacggtccctctgtggattatgtctgcaacggagcctacataattacaatgcccactcggtactcatcgttggggattttgtcggtgcggcggcggatatgctagtttcgacgctggatcggttacttctacccgctttggatagctatttacatcgggcgtctgtctgttgaagctcgcttatttcagattgctgaggagttaggagttttcatttatgactgaatctatgctagccaaaagacgcagcgcggctattgcaagaggcgtgggcgtgaccacacaagtctatgcggagcgtgcggaaaacgctgaaatttgggacgttcatgggcaacgttatatcgattttgccgccggtatcgccgtggtgaataccggccactgccatccgcgcgtcatcgcggcagccagagaacagatggaacagttcacccacacctgccatcaggtggtgccctacgaaaattatgtggcgttggccgaacgtctaaaccgcttggtgcccggtaatttcgcgaagaaaaccgtctttgtcactaccggggccgaggcggtggaaaatgctgtaaagatcgcgcgtgccgctaccgggcgcagtggcgtggtagctttcagcggtgctttccatggccgtaccttcctcggtatgtcattaaccggcaaagttgcaccgtacaaaatggggttcggcccgctggttagcgacgtttaccgtgttccgtttccggtcgggctgcatggcattagtgtggaacaaacgctgaatgcgctggaaaatctctttaaagccgacattgagcccacgcgcgttgctgccatcatcatcgaaccgatacagggcgaaggcggtttctatcctgctcctcccgagctgctcaaagcgctgcgtgagatcgccgattgccacggcattgtacttatcgccgatgagatccagaccggtttcgcacgtacgggcaaactgtttgctatggagcatcatgaggttgttgccgatctgaccactatggcgaaaagtctggcgggcggtttgccgctggcagcggtaacgggacgtgcagagttgatggacgctgtagtgcccggcggtctggggggaacttatggtggtaacccggtggcgattgcagccgcccatgcggtgctggatgtgatcgaagaagaaaagctgaatgtgcgagcgacacagctgggagagcaactaaaacagcgtctgcatgaactgcgaccgcatgtcccgcagattgccgacgtgcgagggctcgggctgatgattgcggtggagtttaaccatgcggacagtcaggaacccgatgccaactttaccaacgcggtacgccagaaagcgctggagtgtggtctgatcctgttgatgtgcggtgtacacggtaacgtgatccgtttccttccgccgctgaccatacaaaatgacgtttttaatgaagcgctcaacattctggaatctgtgctgctcgatctgactaaacagtagagtagatataatcggttacctcacaagaggggataacaatgcactggtatttaaatgtattaaagaactatgcatatttcagggggcgggcccggcgtaaggagttctggtatttttttctgttccaaatcttggctgtatttattatctctttccttgaaaactactttgctgttgccaatcctgaaatttatatgggctggttcagcgctatctatctgctgctcacgtttttgcccgcgctagcagtgaatgctcgccgcctgcacgacatcaactgtagcgcttggtggttactgctacatctcataccgtttatcggcactattatcctgctgattctcgccggtctgaaagggagctctggcaacaataaatacagctcagatagccggactcacccatagcaaaactctccggactcggccagcaggtgatttcaagatcatgacaggagtgttgaaatgacaatgaatagaagagcctttatctctaccgtcgcgacgctcgcgggggcaggagtgctttcatccgcacttcccaatttatccctgctcgcccggaccttaaccgcggccgatgctccggctaacactattgataagctccggccaacactattggaggatgcacagcatagagccagccggttgggactggatccgcgcatctggagctggcataaagacgctgctgctggcgtcatgccagccaactattatgaagcttctttagctgactggcccgctttgggaaacctacccggagaccagaactgcgaagttgtggttatcggcggagggttgctgggtgcttccacggcattgcatcttgctgaagcgggagtggacgtgattctggttgaaaaggataacattggttcaggagcttctggccgcaacgggggacagataacccctgggctcgcacgctgggaagctaagaccatactggaaaaactttcattcgatgaggctaaacgcttatggcgttttgcctctgttgaagcgatgaatctcttggatgaactccgtgagcgttatcgtttcgaatgtgaccgcaaatatggtcatatcactgttgcagtgcacgcaggccacatggggccgctggtggctaatgccgatgcccggcgtcaactgggagatacggcgatgaaggttatcgggccgcacgaattgcaggaagagtatgtgcgttcgggcatctaccacggagcaaatatcgacagtatcggtgggcaggtccagcctctggcactgttgcgtggtctggcttatggtttcgccagactgggtgggcgaatctatgacagcacaaaagtgaagggcatcaagcaggatactggtggcacagtcgtagaaactgagcgggggactatcagggcaagtaaagccgtggtgttgggtgtgcatggctccacgggtgagtttatctccggcccttccaccacggtgccttttttctcctacgtggcggtaacgccgccgttgccagtggatgtcaaagaattgatcccgtcaaatctgccggtctacgatacacagttacaggttgactactatcgtgcggtgcgcaacaaccgcctactgttcggtggacaggggactggcaattcctggtcaccacgtgatgtgaacaactatctgcttgggcgtatcagaaccgtgttcccgcagttggaaaaagctgaactggaatattcctggggcgggatcagcgatctgaccctgaacggtgccaccgatgctcgcaagagcaacgacagagtacccgtgtatatggtacatggctggagtggtcatggcgtggtgcaaacggtacgcattggcaaagctatcagcgacgatctgaccagacgcaacgacgactttaccatgcttacctccattgaccacgcgagtatcccgctgggttcctatctctctccggtagccattccgttggctaagggtattctgggagtgatcagcacgcttaatccggcagacatagtttcgttctgagcattacctcactaatatgtcttatgtgagcacttctggagtaactctctataagtattctgtgtttcactaagcaattattgataccgccaccgcatgatctagagtcaatagaactctcaaattgcgcctgtaatagcactacacatagcactacacatagcactatacatagcactacacaatgaggaatatcaaatggatcgtatgctagaaggtaaggttgtgattgtcactggcggcgcgagtggcatcggagcaggtattgctttagccgctgcgcgtcatggcgcagcaaccgtaattatcggcgatatcacggatcaaccccgagagggaggaacgccagtgttccagcgtctccgtgcgcttggtacacaagccatattccaccggtgtgatgtcacctcgcgaagcgagatggatgcattagtcgatatcgctacaccattcggcggtgttgatttgatggcttgcaatgcaggaattgcattagctaccgatggcccacagattaatgcggacgattttcacaaactgcttacggtcaaccttgatggtgttttatttggcgcccaggctgctgctgaacagatgataaaactgggcaaacgcggaagtattgtagcaacgtcaagtatggggtccattaggacaggacaacttacaaccgcctattccacaagcaaagctggcgtgaatatgatggtggccgcattggccgatgcttttgggccgtcaggtattcgtgttaatgcagtatgcccagggctgatcaatacagcacttcctctttcctcgccggaagtcgcgaaaatgtttgatgggttacgggagaggatgccccttcgtcgattgggagaaccggaagaggtaggaaatgcagttgtgtggttaggatcagatctcgcgtcgtttataactggcgtatcactgctagtcgacggcggacaaacggtagtactgtgagaacacgcatttttgcgcagttggtatattccaaaggagagtagggtaaaatggctgtttctcaattatatgctggacttctttatatatacccgtcatctttcaagttgcctctttgttggctgcactcactcatcccggtcacatagttacctatgctcccggggattcgctcccttgccgtcgcgatccctcttgaaatccatagggtatagaatcagcagaactgaacatttgcgccagttttatcaattgagcaatttcatcattggaggcaccatttctgaggatatccagtaccgtcgtggattcagccaactcgataccaagattaaatgtcttgattttacggaggaaaaaaccgcacttttttacgccactgactggacctagattagccagcatttctggaacacctgttaaatatcccttattgctagtttttttatttaccgaaaactgaaatacaggatataaattctctattccccaatttaatacaatgagtttatgattttcaccatacttatttactgtcgggcgggtcactcctaatatatcagcaaccttactggacttataaacaccaccgtattccccaagatgggcaagaaaagcgtttctagtttcgataaattcctcgtgttctttcttttcctgtgtgatatttgccactatttcaatatagttagctcgtcctttgacttctgaccaaaattcatcatcaggtaaagtcaacaactgagaaatactctctgaatctttgtttttaagcacattaataaaatgatcagcaagattgatgatacgtgctctgaccagttcaggctgatcaaatccacttttcagttttactgccagagcattgagctctttcgtcgttgtccccatagagttacctcaattatttttgtcatttttaaaaatgagcatacatgaaatggtaagattttggcacctatggtcttaatcgtttgtggaaaaacctcagccgagctccttagtgcaagcattatttctcagcactctttccacaaatcagaataaataatattatcatctaaacttaaactaaattcataaaaaggatcatcgaaaaaataagaggtatatatgcacagccaaattaattcattgccccaatatatgttagctatcagtatcattaagcccggaggcccggagaaattgcatttggttcaggttccgttgccgcggccaggaaaaggttacttgttagtaaaagtggcggcggcgggtgtgaatcggcctgatatatttcagagaatgggttcttacccaccaccacctgatgcatctccattgccggggttagaaattgcaggagaagtggttgccaaaggtgaaggttgtgaacgctggaaccttggcgataaagtttgtgcccttgttgccggaggcggttatgccgagtattgtctggtacatgactccgttgccttacccatctatggcttggattttgttcaggcagccgcattgccagaaaacttttttaccgtctgggcaaatgtttttcagactggtcagttgaaaccaggagaaaatttgctgattcacggtggtacttctggaataggcagtgtcactattatgttagcaaaagcctttggtgccaaagttattactaccgtcggctctgatgagaaagccaaagttgcacacagtttaggtgctgactttgttattaattaccataaagaagatttcgttgatcgggtattgaaaatcacgggtaatcatggggttgatatggttgttgatttaatcggtggtgattatgttaataaaaactataaggttgctgctaaattcgggagaattattcagattggtatgatgaaaggaaaccctgaaaatcttaatctgatgcccttaatgctaaaacgtctgactcacacaggttctacattacgttctcgcagtgtagaagaaaaagcagagatagccaaagagttagaaaaacaggtctggccactactgaaatcaggaaaagtcactccattaatttgtaaggtatttgatctgaaagatgcggctgatgcacatcgaatgatggaagccggtgatgttatcggcaaggttatgctggtaaatgtatcaccttaatagtacttctgcttaaatcagggctattttaacttgtagccctgcattctatctactaacctcttcgcgttagaataaaccattatagttaataaggttaatgacaaataacgctctattttttgattggtttttattcgttctttgtcctcgcgcacaaaatcagaatttatatttaacgtcattgttaatattttaacaaatatagtctatatctattaacaaatgatcgtttatagatatgttaatgattaatctattacacctgatagatttttcttaatgtttagaataatgaggtatgaccagctatgagtaagttaggtggcatacaattttctgtctgcctatcagaggataatagtgatttcattaataaataaagaatttaaaaatctctctgttgctgacagccgtttttgttagttggaaaagggtatgtgattatgaccaagcagtttacttcgcacttaaacattgatgcgttgtttttaggccctaaatcagaaaatacggttttttttagagaaatgatggaatatgccgtaagtgagcacatgcactggcgttctgattttcatcctgaagaccccgccttggtaacttcagttgatcgttacgcacctgattatagagaaaccctttatcggacagagggtattctgaaccagctatctgccaaactgaaaaacacctctgttccctggttttctcctcgttatatgggacatatgaatgccgataccttgatggtctccaatctcgcttatgtcatggctatgatgtacaacccgaacaattgtgcccacgagtcatcaccgacaacaacagagctagaaattgaagcagggctagatttatgccggatgtttggttatgaccctcgccgagcctggggacatatcacatcgggaggaactgtcgctaattatgaagggctatgggttgcgcgtaatttaaaaaccatgcctcttgccattgcacaacacccgcaatctcgtgatttggttgcaaataaatcagaacaacaactgttgaatatgtcgtcatcagacattctggatttaacggatgaattaaagaagcgtggcattttcgaagaagttcgtgaactttcttgccggggtgttgggataaaacagggaatgttcggcaaggtcttggtaccacaatcgaaacattattcatggatgaaagcaatggatgttctagggattggtcaacagcatattgtgccattgccggtcgatgcaaattatcgtaccgatgttgaaaaaatgcgcgaaattacattcagtctgatagagcagggagaacctattctagcgatggtaaccgtagttggaactacggaagtgggtgccattgatcgagttgatgaagttattgcattgcgtaaagagtgtgaagagcgttatggcgtctcattttatgtgcatattgatgctgcttatgccggttatgccagcgcaatgttccttaacgagcagggagagtttatggaatatgatgaacttatccgtcgttatcgtgaattggcaatcattccggaagatattatttggcctaaacctgaaatttaccaaagtttccgggccatgtgtcaggctgattcaatcactgtagatcctcacaaagttggatttattcaatatgccgccggtgcggtatgtatgaaagataaacgtactgttgacctaatttcctaccgtgcagcttatgtttttgaagatgttgatacgcaacaggatcaagctgttaatcggcgtgtcgtgctcggtgcttctattatggagggatctaaagccggagctatcgccgccgcaatttgggctgcgcatcgattggttccactgaatatcagtggctacggaaaagtcattgctgccggtattgtgacggccaattggatggttaaaaaacttttaaccacagaaccattggttgttgataaacgccggtttgaaattcatgccatgccgaatcctgatttccatatggtcaattttacttttaaagagcaaggaaatgatgacttaatacatcataatcgtcttaataaacggatgtacgaactttgttcatatgcctctggacgtacttataccaatgattttttgacttcttccacctcccttggttatgaagagtatggtgatactccctggcattatgttgcaagttgcggttttgaccaaaaagaatggcagaaagtccaccgtttatatgtcttacgggctgctgtgatgactcattgtttacgtaatgctgacgattttgacgagtattgggaaaggctccagaaaatttttattcacaaactgactcaatttattgatgaagaagaaaaaaagaaagtggcctgattttctattattaaatatttgctgttgattcgaagggaaaaaacgtgaagaaccgtacttttggcagtacttttattatcgccggaacaaccatcggtgctggtatgctagccatgccattagccaccgccggtgtaggatttggtgtaagtttgatcatgttggttagcttgtgggttttgatgagttacaccgcattattgctggttgaaacttaccaatatgaatcccctgatacggggttagggacacttgctcaacgttatcttggcagcagcggcaaaatattagccggtttcagcatgatgtttctaatgtatgcattaacatcagcctacattagtggcgcaggggaattactgacagtcagcctcaacaaatggctgaatctatctcttcctgcctcagtcggtgttatcctgtttaccgtgattggtgggggagttgtttgcattggtacccgttcagtagatatggttaaccgagttatttttggtgcaaaaattattttcttggtattaatgttggggatgatgatgccgcatgttcagcatattaacttactgaccatgccattagaacaaggattaatactatcttcaattccggtgatattcacctcgtttggttttcacggtagtgttcccagtattgtgaaatatatggatggcgatatccgtcgactccgctgggtgtttatcatcggcagcgcaattccgctaattgcttatattctctggcaattggcgacactcggaagtattaattccagcacattcgtcaatattttagctgaaaacgcagggttgaatggcttattacacagcattcgcgaagttgttgcttcaccgaaaactgagcttgcagtacaaatgtttgccaacctggcgctcgcaacctcattcctcggtgtcacacttggcctgtttgattttctgggtgatctatttaaacgcaaaaatagcgtagccgggcgtatgcaaactggtttgttaactttcgttccgccattgattttcgcgctattttacccaaaaggatttgtaatggcgttaggatatgccgcggtcgcgctatcaattttggcgttagtattgcctagcctcctggcatataaatcccgccagcaaaatgaacgtcgatatcgggtacctggtggtaagcctgtactattactggtgtttgcctgcggtattgcagtaatagcaatccaaattggcatagtcagtggaatgttgccggaagtagggtgaatacagggttatcgaagacaggttatttttttgatccaaataagttcttttttgacctaaagcgtattctctgacagactgctagcataatagacctattagcggaggcaattatgaatcatacccgttacgaaactgatgtggtcgcttgggcaaatgaacaggcagcgttattacgtgccggtaaattctctgagattgatatagccaatattgctgaagagatcgaagacgtgggcaagagtgaacagcgtgagttggctagccgcatggcagtattaattgctcacttattaaaatggaaataccagccaagccatagaggaacaagttgggaaagaaccattaaagcgcaaagaaaagagattctttatggtttaaaagaatctcctagcttaaagacaaagttaaatgattcagactgggttgatgttgtttggtctaaagccgttgcctcagcaatgaacgaaaccgggttagacgtgtttcccgacgtatgcatttggggtatgtcccagatactgtcccctgaattttatcctgattagcaaaaatctatatgaataatcaaactaaagttttaacagctcacattccacatccggcatgggtttctcaagaggaagagcaagaaagaacaattaaaagataagcactttaaaaacaaaatggagaaaaattaaaagttataataactatacccaatggatttcaagatgcatcgcgacggcaagggagcgaatccccgggagcatagataacgatgtgaccggggtgagtgagtgcagccaacaaataggcaatttgaaagatgacgggtatatctctattttcccctgtgaaaaactaacattaattataaggagttggatcatggcgaaagagttatttactgccacagtaaaatctgtagctggattgaaagttgaatgtacatcaagagatttctccttttatttggatgaaccgcgtaatttaggtggtactaatcaggggatgaatcccgttgaagctttactctgttctctcggggcctgcaaatgtatcgtagcaaaggcttttgctaaactgcacaaaattaacttaattgatattcacgttgatctggaaggcgagcttgatactgatggtttcactggtagaaataaacaagcgaaattaggtttctccaaaattgtgacaaaatttcatattaaagctgataatagtgaagaagaaattcatgcctttgtcgactttattaataaaacctgcccagttcacgacactattgagaatgcaccaagttttgtcactgaaatatattgtgaataagataaatactgagttgaaataattccgaaaaggaaaaattttttaagttaatttaaaaagccctctactttttagtagagggcttcgttataaagttaggtaaatcaatgtttatctatcgctttctttatcccattgataacagaataagaaacaatgactattgtttaataatgtaaacggtagttatattacaactcgcattttctatgccaactttaatatttaaaccctgtgcataagcttggcttaatagcttgttaatgttatcagcgcttgaacctgaccaaatataacctggttttccacagttaccggctaatcctccactgaatgtataaagataatgtgcaggattgtcccaatccgctttaatttctgcgactttgacaatgccactattggtttccgcagaaaatgcagggatgctaatcataccaatgaaaataaatagcatagatatcaattttttcatattctactcctagttaataataaagaaaatttgacgcatttgaagtgtaaattatgcaaataatctttgcatcaacttcatattaatataataggttcctagcatgataaataatgccggaagttttttcattaaaattaattaattgatataaataacatcaacattgtttaaaataataaaaacctctacctataatggttcataatcaattcaccaattaattatattaaaacaacaaaaatccattctcataacaaactatttatatcaagataattttgacgatgaagatgaaatgattaatcatctattcaaataaaataacggcgataaattatttacttgataaatatcttttaatatcgttttatctactcgacactaagaaaaaaaatttttaacaaatcacttctattaataaattttttaacgtagaagtatatatatttctggcgtatcccattacactatattaaatagttaatatacatattattaatctagtaaaaggctccatcgatatggataaatcattgtacaattcagaatcaacattaaagtcttatttaggtataggaaatgagggagtatctgataaccttttagcggtacttaaaagcaattgtgtcaattatcagtcgtcagtaaaaaaattcatagaacttcttgaatatattcaaaataataatattcgcacgaaaccatttaatgaattagttgcgcttcatgaacttgtagctccacatgattgcgctgtagtttctatgctatcaattcattataatttagccatcggcactgtcgctaacttaggcgtgcaaactccatatgtggaagatctttaccaaaaactttgttcaggtcgtgccattggagtatatctggcgactgagctagctcacgggaatgatctaatcgcaatcgaaacacaggctaattatctgccggaaaaaggcgtattcatgctaaattcacctagcccaaatgcatataaatttatgcctaataccatgccttgtgaattacccaaagtggctgtaattttagctcagttaaatgtatcaggaaaaaaatatggtattttcccatttcttcttcctctgtctgtaaatggaaaattaacgcccggcgttaaaattaccccacttggcgataagcccgggttttatttagataatgcaataacttcatttgataatgtcgaaattccctttgaaggactccttgcgggtaatatgataaccctgaccagggagggtaaagtatcattgcatattaaagaattaagagaaagattctcgttaattacaaatagaatacattcagggaagttatgcatggcaatgatctcagtgacagcggccaaatcagttcttcatataactagcacatatggaaataaacgacaaacattcggctattcaggtgctatgccaataattaattattctcatttcaaagaaggtatcgcctgggataccctgagcaccatcactcatacgttatacttaagagagctaacaagaaaagtttcaactatattatcagaatcaattaaaaactttaagttttcagatgaactacttattgaaatcattactaccaagtccctgtgcacatggcgtacacaagaaatattaattaattgtcgtgagcgttgcggcgcacaggggttatttacggttaacaagatatccccttatttgatatctaattttggtacgattacttcggaaggtgataaccttgtattatcactaaaagccggagggatgatcattctcaataagatgaaagaaataaacaaagcatctttccaacataacctatttcccattttgcatgactatatgaactttttatataaaaagttaaatggattaatagcgagtaacaataaaaagataaacttagatattcttaataagcatagtggggattttctagaactaagccaaacatatgccgttttatccgtggtgacgacaactattgatgcataccatgataataatgatgatgatctttgtatgatcatcgaaggttatcttctcgactggattcatcgtaacatgagcaatctcctgagaagtgaagtgatcaatttacaagaatctaaaaaaatagatgagagacgcattgagtatatacgccagcatgcagacagaataaatgattatattcccagttttggcgtagataaggctggaatcgaaacgccgatatccagtgatgattatatttcctggtatgcaaataatcaccatcagttaaaaaacaattaaccccaggtatgggaaagcaggtcaaaatgcggggtactacctaaagttaaaattaattaaaaaagcctctatcttactatatacccaatggctatatgcccaatggatttcaagatggatcgcgacggcaagggagcgaatccccgggagcataggtaactatgtgaccggggtgagtgagtgcagcaacaaagaggcaacttgaaagataacgggtatagaggcttttattgctaaattcaggtagtcagtaactcaatattatgtttcagatccatttttctcctcagctaatttatcagccacttgtttagaaaactgattaccgccatctcgtgcggtataatgcaaatgaataagaatatcttttaatttccaaccgccattaatgttttttagcacctgatcgataacttgcttatcagggaatttcaggttccaggttgaaatagcaccagttccttcaaatggcagataacgatcatcatcaaacatcaaggtacataaccaattctctgttgctactccaccatcatcttcatgtattgaagagagggcaatttgttgctgtgcgcgtaaattggttttgatatttctattgttgcctgcttttctcgtcggatcatagagccaattaactccgttaatatcagtatcaactaacgttgaactgcttgtttgtgtcaaaatcgcgcaaatttccggggtagctattggctcggaacccgcgttttccagcgataatgacacagaaacccgttttatctgacgcaaataatgtccgggatagtttttatcaaaggcccgtgcgtccagagtgaaatttatctcctgttttttgtcaatttgatcagttatctctttgatagaagacacagtactaagaagagagaaggtttttttgatatttaaacagcgttcgtgacgctgtaaccaagccgcttccatttgctgtagatccaattgtaatgattcgcccgccagaaagccccgataggaattattccaagcatcggccttgataaaaaaccttgttgttgataatcaccaacttcataacgccagccagcttcaaccattaagcacagtgataaaacagcatcataggcaggagcatataatatagaaagtcgattcatcagccattgatatgtcggtacaaccagaaaacctgtcgttataaattcatacaactcaacagccgcatttcgctgtgcctgagcttctcgtaatgagatttgagcgctttgaatcagtaactcctgctcttttaactgcttgtcaatgatattgatttcactttgtgcttgtttccactcaatttcccaatcctgacgccgctgctgatagtttgctccatcttgaagccgatccgctgtcatgcctaatgtcagtccggtgatttcagcaactagtgctgttcttaccaaaggagctgcgtagttacctcctcctaccgccagaccaaaaatattgggtaaagtttccaccgcggcactcatgatatggaagggaacggctgccattcttgtgatttccgatgtagtcttgagagctatagctgatatttccaagccagaaagattctcttcatataaaccgtagtaatgctcataccgttgttgcgccatatttttacttgcttctaaagcagctttactagcctgagcaatttcaatagcttgttgttgcaactctatagcaaaagcagataacttaatgacttgcgattgttgtaacacctgttgttcagcgttaatctcattttctgtcgccctgaacagtctatctcctagttgaattaactgtttcacggctttactggcacgttttaacatgatcgggaaacgatagggcggaacttgctgtagcgaactattagatgtaccggcgatattacccgaatgtcgctggattagtaataacgccgttcttcgcaaagccggtaagataccaggaaaggcagatgaaagaataattcccagaaatactgtccattagcaccttggaaatcgacaggggtagattgagagcctgtacctaatggagcactatttgacagaggcagctgctgcataagtgccccacagatttttatggtctcctatttctcttttcacaactttagtcggtcagcaaggcgtgccaataagtccatcctctcatgaaaaattgccactattaacgcaggagcatctttgcgtggcaaacaaaatacatagtgatgttcacaacgcgccatgcgcaatgctggaaagaattcgctcatatccttgaaagattgccgcaagcgagacgtccaataccttgtttcagggtagtgatgtaatggtgtacctgagcatccccccattgcttacgtgtataactaataattgtgcgcaaatcggcttcagaggcttctgtttagtatatagtccattaatcgcgtccgttcttggcaagttcttcattaagaatttcgtcgatgctttttttggataccttgccttccatcccttcactgatccgcgtatttaacaagaccttcaattcttgccatgcctgatcactatcggtcatgtcagggaacaaacgttcgagtgtatattgcttgattgtcttgccatgcaaggctgccagcgctttcaaacttttgtgttgttgatcggttatatcaatagttaaacggctcatagtttattctccttatgaattcacccacaaacccacattagcacatatgatgtcttatagctatttataaggccatctcagcggagtttcatcagatgcttatttgaagcacgttcacactgttttcttggtggtttatatcgtattcaaaatgatcaaaatattgctcactttgttttctagagtataaaaatctatggccgccctcgtttttacaacactcatttttgatgaatttttggcttgcttaaatctatccggcgtcactgtaggcaaggagccgagagcataaaaccttggggcatttatgtggtaaagcagctaaagaagccactttaacgtataagagcctatctcaataggcgtaattgttgcagaccattcttatcaatgaacagtgaacacggacagcgcggaaaaaccggagcgtacacgtagtacgtgaggattttgagcactgcccaggttcgctctttatggcaaagaagggcaaataaaatagctctattgggataggcagtaagtattcatgggccgataatgggtaatagtcagtaactcaatattatgtttcagatccatttttctcttcagctaatttatcagccacttctttagcaaactaattattgctatcagcattttttagtacttgatagataacttgcttatgataaccaatccatatttctgtcataaatgttgtgcgattaaagggtcgtaaaaggggttgatatcgtactatttatatgagacaactttatccgagatccaaccgcagtgacgaaattcattttcactgtccggtcagcgatcttcatacggacataatttgcatgggatcaggatgatgactcatcatacagaccaaaagttggaatttctgtcgctgtcagcaagcgaattggagcctaatacaacccggccgagtttatattcccaaatttactgtgtcctgcaaatcggttatttcaaagttaaacacgctttcttccgtttcgcttgtctgatagacagccagtcggtctacattttatttttagaaggataaaagtaaatgtcttatattcaatcgcatttgaagggaaggtgttggtttaccctcggtgacagtataactgaaagagggtggtatcaaccaatagtgaccgaaaatttaggtctaaaagaatggaaaaactacggaatagggggaacatgcctagcccaaaaagatgaaaatgacaattcagccatttgtttaagatatgaaaaaatggaaaacaatccagatattattacaatatggggaggggtaaatgattttggatttaactttggctcctatggaggggtggaaataggtgattataaagacaacacctccttgacatttattggcggtatgaagttattgatggctggaattacaaaaaaatacccattagcgagaatagggtttattataacaacaccaatatcagtacaaagaggcatgaacagtaaaaacgccaaagggtactacttgtctgactattgcagcgtttgtcgggaaatttgcgaaaaatattccatcccatatctggatttattaaaacaatctggattcaatgaaggaaatatcgatattatgaccagcaatagcttgggcacagtgtccgatggtttgcatccatcaaaaataggtatgaccaggattgccccaaaaatttcaaacttcattttatctatttaagagacaaaaaatgagaatattaaccatagatttattaaagatcgtttctatatttttcgttgtaatttctcacgttactttatttttcttgttgcgcaatgataatgacgtggttttgtattttcttaggcaggccggtcagttgggggtctcgttgttttttatgtgcagtggctatttcttactaaacaacaagcatgaaaatcaggtggattacatcattaataaatccaaagggatattaactgtattgttgttttggcttatcttttattatctgtatgacacatattttatcagtaaatttacaacagtgcctactgttaactttttaaattatgttaatgttagcggaactacatcagatgctacccatttatggtttatatttgcaattgtctctctatatatattaacaccactaatgcgtaacacatttaacgaagcaaatgcaaaggggattaagaaaatactcatcataatgcttataatttctaatcttacattgctgaatgcactaacagattacaaattctctttttccctaatcccattcaatattttgcttcctttccaatctgagggtttgattagtttcttgataggcggatatatagggttaacgaaacctaaaataaaggctttttcctgtaaacatataatacttatggtattttttcttatatcattgatatctttatcaatcatttcatccaagatggggatagccttcttttatgggaagttttataatgtattcctccaagcttcttcggtgtgcctgtttttattcttggttaacttgaatatcagagaaataccattcttaatagatgacattagcaagaatatactaggaatatatcttgttcacaatatttttgttattgaaatacataacgaattcgtccataatttcttattaacaaaatttaattacataaatgtatatatttacataatagcctattctttgctggcttttatcctgtcatatatattatgtgttttgctgcggaaatcaaaaataacatcaaaaattataaccatctaacgttattaacagggagagccggcttcttccagctatacccgtcatctttcaagttacttctttgttggctgcactcactcaccccggtcacatagttatctatgctcccggggattctctcccttgccgccgcgatccatcttgaaatccatagggtatatattttcttggtagtaaagtgtattggctaaaggaaggcgttttacaattatcacagaccacaacagtggtttgaaaggtaaaacgccttatgagactcccgttgagaaaatgagagcttaaaaatgctctgtcaatcgaagtcagagatcactcatcatatatttttataatgagttccaacactatgaaccgtcattgtattgtcagtatcattttgagtgaaggttaccctgtctttttggcttagcctcacactatataaattattcggcaatttttccaggttactgccgcttgctgtaccaatactttttgctgctgtctgtggagcgttacccttttgtacctcttttataaatgaactatacttttgttttgcagccccttccatattagaaaatccattcctagatttgttatttttaagttctttaaaactcactctccatttaggcgcttctgttggtccagccaaataacctattctgccatcaggtaatctctgcggtggtcgaaagaaaggtttaggaaacttttttctctcaatataattctctaatgatttagactctaatccattgtaaaagttttttgaaaaaatcctccttcccaatgaagttacagcagataaggtaagtaagaaatcaattaatttaaaaaatcttgcggcatttgattgttgattttcctccagtggaatttcctgtacagagaaaaaatatagtgctaataatttatcgtcatctgaataagcactcaatggtttattttcaagctcaggaacattccaaatgttttgaggatattgaccttcaaaatccagttcattcttataaaaaccatttgccatatctttagaaatttgatcaccattttcacctaatagtgcagatgaaagattagacatatattcttgataaattctctcagcagtctctttattcttataatagtcatcaggaagtttagatacattatgaataccacttacagccaaagcgtaagctaatattattttcttagctcgatattcaattccatatgatgctgtatgaccctcatctgtttgcttaaagtttagtatacgtactatatctcctgctatttgcttttcaacgggtggatatccacttctatcatcaggtgttaattgtataaccattatatttctccattatgttaatgtttatttgagctatgaaatttctggcagaaaactccgcaatttgtcgctactaatataaatttcaactttaaatatagagttttccctggctttttaagcgttaatttcaatgtaaaattaacttacgcaagaattattagcaagcttttctttttccatttctcgttgattttttttcatttaaatcattaggttaatattagttaaataaataatgaaatgagttaaataaaaacagaggacactaaaaataaattgaaccaatacggactttaagaataggataattttatgttaacaaaatatttttaatatagtcatggcgggttatgtaaatgtaagataatcattgcgtatggcaggaaataggcaattttcgatccttgttaataaaaaactcacctaataaataattttcattgaacgtttttttactaataaagccccgtgtaaacgaggctatttttgatatacaaggtcatatagattcaatacaccacggtgtaatatctcaactcctacggcgcgatataactaatttatccttaggacggtccacccaatcggagggattattgttgaagttatccgcaagcagataagacggcgttttagctaaccaatcagaaagtgaaatatcttggtagataccgttatctagcacaatcagtacttgaagatcatcattaccaatattttcgatatagtgaccaaatcccagtggcacataaccaacgtcggtcggcccatattttgcggtttgggcgtgtccgtgggaactaaacacggtcatacgtcctttgcctgaaatgtagtattgccactcgttggcattagggtgccaatgtagttcacgtatagcgccaggtttgatggtctcgatgaggccagtgatcgttgtagaaatggggaattccttcgatgatgctcgataaacactccctgcgtcgttctcgaagaagggtttgttcttcaagagttcataacggtgggtgagtggggcatcgtttaatccgccgtcatcggcgggtaggggaagttttggcgggatagcgccaccgacaatgtaagcttcaccctgtttgattttagaaaaaacagatgctggcatgttgacacttttctcaagcacctctttcggcatatgcgttatccaatcagtgatgctaaaagtgccaaattctgagaagtgtccgttatcaaaagtcagaataaaatgcgcaccatcttcaagcgcctgaatggaatgaccatgacctttgggaaaataccatacatcaccgggaccaaaatcagctacttcacttctgccctccggatcaataatggtaatacgtgcatgcccttcaagcatatatgcccattcagcggcaacagcatgccaatggagttcacgcacgccacccggttcaagcatcatgtcaacacccgcaatcccttcagatatcgggaattgttccaccgtagcttcccgtgcccatccattttctaatacccgttttttactatcggtgaatttatatttatacaaacttttagcatctgtggacggtttactattacccgcggcagccgtattgtgctgttcatcagcaacagccgttttaatcataccgcccatgctagcggccgccgcgccaattgcggatgccttcaagatatcacgacgagagaacatatttattgcctccaattaaaatgggtaccagcaagaatagttgcaagctgatatctatttgtttgatttttttaagttactggttgtcacggaaggaaaaattagaggtgactgattaagcatagtagaaaattagtcgtctagggaaaaccagagacaactctggttttcccggaaaagttattacttcatttactcttttttaccagagcaagggcgaacgtatttcataatgcagtcaagtttttcacaagtttcctgccactctctttctggttttgaatctctgaccaatcctgcgccagcctggagccaacagcgaccttgatgctgatagagagaacgtaataccagcgcagcatccagtttacctgagctatctaataacatgacacaaccactataaagccggcgtggttcaccttcataacgtgaaattgcctgtaaagaggtttttttcggtatccccgaagcggttacagccgggaatagggcgatgaacgcatcccaacgatttttgtctgtttgtagtaatccttttacccgtgatgccaaatgttgtactgaacctcgttcacgaatcgccataaactctgatacacaaagtgtgtcagcctgacaaatcggtgccagttcctctaatgccaatttagccgaaacagcatgttcagagatctccttcgggtcagaaagcaaatctgctctcaatcgttgatcctgatctttgtcatgtgtcaatgctctggttccagccaatggttgcgtgctaacccaacctgaaccatccgcttcaactacggtttccgggctaaaaccataaacagagaaatcttcatcacgtaagaagaaagagcgggcaggtgtgttagcttggcggcctaaccagtagctgtgtggcatgtcaatatccgagccaagttcaactcgacgtgacaggatcactttttgatagtggcccgaggcaatgtccttaaccgcattggcgacgttatcctgataacgtttcgccgcgtctgatgtactgataatttccctatcttttgtccacgggaaaacaggtgttcctaattgatcaacctggctaattttttccctcaatatggtgagttgactctcttcgagcgttcgtatcagaacctgtcctggagttatgcgtaattcatgctgtggaatagtgatttttatcaacgcttcgttctgttgtgctaatggcaacccatatgtcatatgggagaattcaaataacgttcttccataggcccgccaatcctgaatgggaagggcattaagcgcttgttcaagtttttggctcaacgtgctgatatcgtatggatggcgattaccttgtgaatcaatcaattgtcccgatgcatccgcactgatggtcgctgcacagcctatccccagtgaccattcacctttcacttcatagagcatataaggttgtgcttcgccttctgaaagcaaatgtgtgatcaaatctaacggagtgctggtaataacaactgtttgttcatgatattgctgcattgggcggccatgttctgcttgtgccatctgtaccaagcggcgtttatcaatttttcccacggtagtaagtggccaatatgggacaaacaaccattggtcaggaattttatgacgctgaacccctttctgttgtagaaatgccgctatctgcaccggttctggttgattgccgttgttaggtaaacaggcgcaggttcgttcacccagcaattcatcaggcactgaaatgacaacggcatcatcaatatcagggtgttgcagcagcaaggtctcaacttcttgggttgaaattttctcaccactgcggttaatctgctctttaattctgccctcaacgatcaggttgccatctgaggtcatacgaaccagatcgccagtacgatagaacccatcggtggtgaaagctacggtattatgctgctctgcacggtaatatcccgtaatagtgtaagggccacgtgtaataagctctcctacctcaccgggtactacaggttgtaaattggcatcaacaattttgatctcatcttcttctgataacggacgtccttgggtattaatgatgacctcgtggggatcatccaatcgggtataacagagtaatccttccgctgtaccaaacacctgctgcaaaggcccaaggcgtgctattacttgtcccgccagttctggtgtcaacctgccaccacctacttgcaaacagcgcagggatgaaagatcgctttgttcccagtcgcgagcctgttcccagagccgagccagagccggtactaatgctaaatgggtcactttgtgttgctcgattagcggcatggcctcatcaaaactggcggtatcactcagaaggacacttccaccctgggaaaggatacccaaaataccggggctgcctaacgtgaagttatgtgccacaggcagtacggccaaataaacactttccgtatttactgcgcacaaacgggcggagagcacaaaatcataggtataagcatcgtgagtacggggaatgagtttcggcgtaccggttgttccgcccgaaagcagcaatacggcaatatcaccataacttggagcgggaatatttactggtttatcatcaatggatgccaatgcggtaaattcttccgcttctccatcaacaataatgtgttttagatcggggcaaaatgccgcaatttctcgtgccatttcgcggtagtcaaaatcatggaagcaatcagggataatgtaagcaaccggacgtgcaatctggcaaagagcatgaacatcatgtgcccgctgtgtcggcattaataacaccggatgagcaccgagcctaaacagggcaaaacaggtaacgacaaaggagatacggttaggcagttgtaccataacgttatccccacgacggatccctcgacgaaataatccgctggccaatctctctgcggattggtgcaattcacggtaagttagttgttgttcttgatagatcagcgctgttttatcgccccaaataccagaccatccggcaagttgttggtccagcgttttgccattccaaaggtagtctggcgtcatagtaagtgttttcccaggaatagaaaaaggtgccattatgcgaactcctgtaaatagacatattgtataaattgtgtaatgtgacgaataaaattctcaggttcttgagtaatataaaaatggtcgcctacaatctccttgtggcgatatgaacggtgttgttctccgtctgcaagccattgctgccactgctgaacttctatcgcagaagcctctttatcttcactgccataaagcagcaatgttggtgtttgcagttttaccgcgtcagtctgaataaaccggtgataatgttccgtagcaagaaaatcagcccgtagcatcggtaagaacagcgcaagcaagccaggatcttctcgcaaaatcgggctacaaccgccgatatcaatcaattgttcaataaattcatgatcaggtaatccgctaagttggcggcgggattgaagatgaggtgcatggcaccccgaaagcaccagtgccttgggtgaacaattttgttgctcaaggcgttggcaagtttcaaaagcaacttgggcccccatactgtgaccgacaagtatcaggttctctctctgtgcgggggtgaatgacaccatcaggtcagaaagtgattgcgccaatggcacaatactggtggccgccttttctgtcatacggctgtctcgtccggggtaaatcacgagtgaaaccgctatatctgaattttctagtgtggaccagtggcggaatgcactggtactgcccccagcaaaggggcagattaacagcgtgtatttgggtttgccgtgagtcgtcaagcaaggacgaatcatcgggtgtgtagggagtgcccacgtcatcaacattcttccttagttaacatcaattttgctggctcaatccaaacagggggcgataaatcctgagtaacaggctctcccataatgcgcaaaatttgttgccataaacctgctagccgcagttggtaatcgtaagcaaaagccggtgggcaaagggcaccgttcaatacagaacctaaggtattgagcaaaaatgccacacctttagccccatcacattcaaatgctgtcatccagtttttggttgccggacaaagaatttgtgatgtcgcttggtacagatagttatcatccggctgactggcattcaggtagaggctttgttcgttattcagatgatcaggtgcatgaaggacgggtgtccagataaccggcccgtaactggcttcctgcgtaagataaccgacaggccagatcagcgtcattttatgcatcaccagattgtgcatatcgggatctcttgggtccagataggattgcacgtttaatgttacggttgtcccttcgaagctaagttcaaagcaatgaaatgcaccgcttcgctgaccgacataaactatctccatctgttccggacaatgacatgcctgtaacaacagatcgagcgcagaaaatagcaattggcgactggttgtcaaataaccacttaccggacgttgctgtgataagtgagtgatttgccgcgccgcatgtaaccaacttcttccagcatgacattggctataaaagctatttacccaaaacattgcatcatgtttgttggcggttaattgatgttttttgatagcttcggcatcaaggggatgttcctgaatgacagaaattccacgcgccaaaagtgcctgagtgagctgatcgcctttgccgccaataacctccgcccgtattaccacgcaggcaatatcaatatcatctggtagttcatccagtgagcggaataggggcacattaaaatcacaggcaagttgctgcgaacgagcgctaccctgtgccaaaataccggctaattccagaccagactgaggttgtaagaacgcattaagatataattcgccaaatttcgaaccgacaatcagaacccgccgtggctttatcatatgttctccttaacaagattagtggttgatactgaattcaagatatctttcatacaggtaaccagtgagccaacatgttgatgttggaacaaggtgtaatgatcacccgcaagttgtgtcacatggactggcccaaaagcctgccagccaagatcgattgaggcgatggtggttggatcgagataatccataaaatcaggtagtgcctgtgctgcccgaataagccagaaaggctgtgaagtctgcggtggacagtaatcaagcaacgcatttaagttatggtgccacacgtcataaagtgcggtcagcgagctatcaatctgtgcagattgtggcaaagcagcgtgcaacgtattaaggaaggtctccgtatcggcagcgataacatgatcatccagagtgagaccggggaattgcccctgcaaatcgagcaggaaatgacgatgacaaaatgtttcattcagcgtcaaatcggcccgcacatttggcgcaaagctatcaattaggatgcattgagaaatgcgttcacccatcgctcgtaattgatgagccatttcataagccaccaatccaccgaaagaccatcctgccaaagcataaggcccttgtggctggaaggcgcggatttgactgatatagtcagccgccaacgccgccacggaaggggtatctggagttaaattatctggcgaaaatgccaacccaatcatacgttggtcaccgaaactggccgctaaatgacgataccctaacaaatgcccgccaataggatggacgataaacagggcaggttgctcaacgcttcccttgttcaatatcaccccttggcaaaggctttctggctgatgttcaataaattcagccaaagagtgtacggtatcgtaagtttgtagcagactgagcggatattgacggttaaacgtctgattgattttcaccattaaccgtaccgccgccagagaatctccacctagcgtaaagaaactttcatgcacaccgatagcttgttgttccaatactgattgccaaaggttcaacacagcttgtgctgtcacactgagagcaaccgacgatgcaagattgacttcctgtgctgccacctcaaccaaggtagctaatgcgcgtctgtcaattttgccgttgtcggatacagggatcgcatcaagaatgataaatcgctgtgggcacatccaaacaggcaaggtctgttgcaaccaatgaggcagaaccggtaaaagttctgtagatagcggggtttcatcagacaaacgcaaacccgcgacaagttgcaatgcaccggttgacgtagtatgtgcaaacgctaatgcttgttgtatatccgggtgctcgcataagcggtgttcgatctcacctagctcaatccggtagccccgaattttaatctggtgatcattgcgccccagaaactcaatattaccgtctggccgccagcgacctaagtcaccggtgcggtataaccgttcaccggtttgaggatgggtaataaaggcttgggcagttttttccaaatcagcccagtagcctaaagctaacccttgtccaccaatatagagttcccccgttacccaaaccgggcagggcgaaagcgttgcattgagcacatagaaagtctgattagccagtggttttccgtatggaatgctgcgccagtttggatcaacctgagcaataggataggcaatagaccaaattgatgcttcggttgcaccgcccaaactgagaagattcaacgcagggtgaagagcagataatctttccggtaaactggtcggtatccaatcaccactcatcaatacccaacgcaggctattcagggaatgtgggtaatctctggcgtattcctcaagcagttgtacaaatgctggaacagagttccaaactgtgacggattcttgttgtaaccacgtcaataacttgtcggggtgtcggctgtcaccgggagaaggaatcaccagttttgctccacaacttaaagtaccaaacagatcataaactgaaagatcgaatgtcaattctgatatcgccagtacgctatcgtgttcattgagagcaatgcgttggttaatatcaagaatggtattaaccgcaccttgatgatctatcatcacgcctttcggtttgccggtagaacctgatgtgaaaatcacataagccaaatcctcaggatgggcagacaagcgttgtccaccggtatttttcggcaagcggttaagtaatagttcatccagcgagataacctgtacactatcaggccaactcatttgttgagcaaacttaggttgagttaatacagtatcaacttcccctgatgccaatagctgatggatgcgctgttgcgggtagctggcatcaataggcaaataagcccgtcccgccaataaaatcgccataaccgcaacaatctgttcccaacctttttccatcaccacgccaattagtgacgaatgctgatgttcttgtgtttgtagatgagcagccagcgccagactttgtgaccacaaagtgcggtaatcgatttgacgataagcatcaacaaccgcgatacgttgtgggtagcgatttactgcctgttcaattaacgaacaaagcgtatgggaaggaaagacacgcgttgttgcattactgttttggcacaaaattcgatcatttaccgggagccactctggcagtggtgcgctccattgataatcgggttcaagcagggcggcgacgctagcctgataatgagcaaacatattttctgcaacttgtggctggaacagttgcggcaaaattgcccattgaatgataacgccaccctctgagccagaaatcagcatacagtcgagataaacatgcggtgtttgcgcaccaaagagattcagcgttcccagccctgatggcccccgacccgcagtgccggttgtatcgttgaacacgattggcataccggcgtttagattgtgacggtgctgatttttctctctgagtaccagttgtccatcaaatagagcatgttgcagatctgctaaccactgtttctgtatctgacttaccgcatcactgaatccagtgatatggcgtaaatccacttccaacaatgatgtagtggacagatttccgaccaacgtatcgcaatgttgcggcattaacagtcggttgccatgcagaacattgatggtgaaatgctcgctgttgctccataccgccagaatatgggtgaataatgtcagcataacctgtgatggtgaagctcggtattctgctgcgcgttgttgcaaacgctgccattgttgcggactaatatatcccgtcagacattgttgattaagttcttgtgactgatgatcttttagtggcaactctggagcatcaggcagatagggtaaacgattaagccagtattgtcggctttgctgccaagcttcccctgttttctcatcttccagtgcttgaatatagtcactaatagttgctgccggtggttctggctgccagttaggttcctgatatccgcgttgcaaatcgcgtaggattaatgtcaaacttttaccatcagcaaccagtagatcgatagtcaaatgtaataagtgcgtccggtcatcagtacgatatagcgtcaaatcaaacagcggccagttatcgctaggaacacctttagtgcgcaggatatcgcgggcatccgcgagttttgtctcgcgttgagcaggcatcatgttacgacagtcaattaccgtcggggtatagcaaggcacttccggcagaatatgatattgcccatccttcacataaccacgtaattgcgcatgatgactcaccacacggttccaggcagtaatgaagcgaggcagatcaagatcgttgatagccagttcagcgtagaaatgcgcgataccgttaccaaactgaaacagttggctttcgcctaaccaataagcatattgcaacgcagtcagtggcagcgtttgctccgatgctggcttggtctcaattggaacagcctgtgtagcgagtgttgtttcaactgtttcaattgtccgcaaagtacggcaaaactcactcaacttcggatgttcaaaaagctgttgcagatttgcctgttcgtaaccttgacgacgcaattgcaccaccatccgggtagcaattaagctgtcaccgccactttggaaaaagtcactgtggcgctgtattggctgaggaagcagtgaacaccagagcgtgattacctgctgttctatatcatggagctggtcatcttctgtttccggttgtactgcttctggagttgatcgttgtgccacgctctctttagcagccacgatcagcggtaattgttcttgctgttgaacatgcaatgagtaaggcaaagtagaaaattgtgccgctatttcactgacattgagccgtgcttgccgttcagcccgcgccagaatcagttgttgatgcagttctggcccatcttgccccggccattccaatgaaacccgataaccggatttctccaggcactgacgccagtccgcaagatccatcaatgcactatcgccgcgatcatcactccaggcattaataccttcaataaatccgacactagcaagttgcatagcgctttcgcgtttcgttgattcaataatcagtaaccatccaccggttttcagtaaccgtgacaggcgctgtagggtgttttgcagatgagttgcatcatgcaacacattaaccgccataatcaggtcataaccggatgcaggatgttggctaaaatcaatacgctgattaatatcgaacagcgcaaattttacggtttcgccatagtgattaagcaactggcgggcatcatccagaaatagcggcgaaacatcggtaaagtgatagcgttcaatcgattgtgcattgtgttcaagcaccttcgctgaggttgcaccggttcctgcaccgacttccagaacagtgaaatgctcagatacctgactcaattgccggacaatttcagcggccgtttggttcaggcatcgtaacgcgggattctcactatagaggctggcagtgatctgtttatcggcaaacagtagttccaacgcattacttcgtccggcaagcagggcatcatgttgctcgatacatgtcgcgatataacggctaatcgtttgacaccacacagcattgtccagttttgccgtaggagcaggaacacgattaagcggttgcaaacaacggtatccatcagcagttttttcaatcaatccttggttgtttaataacgtcagccattgggtaagaagacgctgatactgtggcgcaagttgtaaatgttgttcaatctctgtgcgagagtggcattgctgaggataagtgaacagattatggcgcagtaatgtctgactcaggccaaataacgcttgctgctcaatgtgctgccaagagcgctcaaatgcctgttgttcagttaactcaggcagcggtaacttatcggtgtttatcgctaatggttctggcagcgataatgacaaattgtcctctgccaccagccagaagttataaccttgcgtgtcatcctgacgtggctgaatttctgccaaccgtatttcaggtttggcacgcaaatattgttcagcttgatgcaattcaggttgttgcggccagaagtcataacgggtatgaccggaaggggggatatgaagatcatactgttctatgcagtcaggctggcagcaaatttgcactaacagcgcattataagcggcaaacagtgcctcaataacccccggtgctaatacatcatccatgcagtaccagttaaacagtagatcgccatctacttccatgacttgatgatccagccagacttgcggggtttgactcagaacaaaaaccgggtctcccagtaactgagtgatcgattgtttgatggcgacgccttcttgcgccattcctaacatgctggtgaaaaccaccggcgtcagcggttgtctgctttgagtttcaccattttgttggcggccaagttctcgcaatacctcaacaccattgacatagttatggctcagccgttgccatagcaaagcttgtgttttctccatgctggcacgcagggaagttgccttacgtaaatcaaaatccatcaacatgactgaggtaaaatcaccaatcagatcttgaacctctggatggaaaggttgccggttaaagaatgtcaggttgagagtaaacagcggatgacggctataccattccagagtatgagcaaacagcgtcagcagaccggcggaaggcgtcacaccccattgttgccagcgttgtttaagcatttgccaatcagattgtgctaatcgaccttcataagtggtgaattgtggctgacgacgctgaggcaattgtggattcagcggcaatcttggtgccggaggcaacgaaggtaattggtgctgccaatatgcccatgatgcctgccactctttacttgcccgttgagcttgttccgccatcacatagtcacggaaagtaaacacctgcgggatcagtggcttctggtggtaagcgcgttgcaagtcgtccatcatgattcggaaactctgtacgtcaaactgcaacagatccagattcatatgtaagcgacaacgtgcattcggtaacagagaaacagaaacttcaaacagtggccactgttctgccggcgggacctggtaagaaagcgtatgacgacgctgaaccagtgcctgttggcaagctgtttcatccagcatacgcaaatcatcttgtgataaagcataccaaggggtttcaggcagaattctttgttgcccgtcttcatccacgaccatgcgcaacatgccatgacgctgaattaaagcattccatgccttctcaaaacgcggaatatcaaaacgatctagtgtcagatcccattcaaataggacgtgacacgcaacaccgccaaaatcaatggcctgagtacgaccaatccagtaagcgtgctgaatgggcgtcaacgggaatggagcatgacgttgggcactgtcaataatgatctcaggctgagagccggttatttgttgttcaggtaacgcgtcgccaataagccgattaagcccctctaaattcatattctgataagccaattcggcagtgagtctgaaaccaaattgctggtggatcactgcatttagctccagaaacaacaaggaatccaaaccaaattgcagtaagtcctgttgcgattccaaacgttcaggctgttctaaccgcagcaatgcagcgacacgttgacgcaaccaattaagccgttcttcactgtcctgatacaacgtgttatcgacagagtgtgaaggtgccgggggtgccactgggtggttatggtcagtatcagcctgtaaacgccgcgaaatatcagggtgatgctcatccaaccgtatcgccagataacaaggagatgcactgcgcagagattgattaaaatgccagataccttcattgacgctgaacggtaacatgccatcttgtgccaatttttccactaatcgccgctcgcgggccataccaacgccaccccaaacaccccaaaccaatgcttttactatcaacggattcggggctgtcagcgccaaagattccaggtaagcattggcaacggcataagcaccttgtccttgagcgcctaacattgatgcggcagaagaatgaagcaacagatagtgtgcattatgttgcttaagagcagtttgcaacgccgatgcactcagggcttttaccgataacatctgtgacagacattgaggttcaagttctgccaaccgggtatgatcagcgatacccgccgcatgaattgccccggcgataccatcctcttgtgccagcatctgtactgcatttaacaaagctggcgtatcagtaacatcaactttaatccagcgtatctcacattcagtattcagtgatgactcttgaacaaaagtgccccaatccgcatgttgacgacgggcaaatactgcaattctacgtgcaccttgagccaacagccaacggacggaaatctgaccaatccctcccattcccccggtcacgatatgccaaccctgatggggaatcgacatcggctgttgagaaagccgtaaggattgacgttgtaaaaccggcaccgaggcttgattgccacgaactctcagccaacggttatgttcactcaaatagccaagcgctaatgacaaagcgtcagcatcgttgatatcagcaatatcaatcgcttgaatacgacgatggggatattcttcaactgcgacacgtaacaatgcccagacagcatattgagctggattgatattctctggtgataaggtggtttccggttgagcgccacaggtgacaacggttaatggtatttcttcatcacgttttagttcggtaataacctgatcgcataattcaagtacatcactgccggtaagcagtaataagatatttccgctttctggctgtaaatcaatacccgcctgacgccaatgattaactatctcgtcattcaccgttgaagaacggagagtatatgccgttgaagatcttgggttatctgtgtttattgtacgccagtgtagggcatagtgggtgttgggacacggttgtggtgcgggaagccatgagttggtcgcagcttgggttgatacaaactgacgcggcagatcacaacgatcgcttaacagggcaaatagacgctcacccgcataaatcaaagccggaaaagcggtgaataaacgtgactctaataatctgcgtttggcatatggcaggggacgatcagggcaatacattttacttgctgttggcccagaaacttcccggtaataaccttgctggacgcaataggttagcaattgttccaacaaagggcaccaacgaggttgcagacgaccagcccgaatagtgtcgatagcactgaaaccttgttcagtatcacgcccatgacattgatataccaatgcatcggtatacaactcacgtagtgttgcagcatcagggttttgctcaatggcaggatcgagcagagcatttacatcaagtccagcattgatattggttgtgggctgcacagatttggttgcagggaagcgataatgctgctcatcaaatggatagagaggagcatgacatttttccccagtaagcgagaaaagatgcggccagtcaagatgcacaccagcacagtaaagttgcatgagagccgtttgctgagctgtctctggagagttttgacgctgtatgccagcaatccaagattcctgtggcagactgacccgtcgcccgatgccagttaattgtgcatcagcccccatctccataaataatgccaccccttgctggcgggcaaactcaacagccgggtaatagcgtacggtctgacgcatatgattacgccagtagtccggtgaacctaattgtgccgccgttgcaatattggcggtcagggtagaaatcagcggaatttcccccaatgcaggttgcaactggctacaacgcagagaaaatgcctccagtacaccatcaagcatggctgaatgtgctgcacaggcaacgtttagacgttggcaacgaatctgctgttgttccaagcgttgtgccaaggtcgcaatttccgtctctgtaccggcccaaacccagtgttgtgggccattgcaaaccgccaaatctaataccagcgaatgaacgaacggaagtacttcttcctcattggcaaaaaccgccagcattgcgcccccttgggagcagttttgcatcagtttgcctcgtaccgccacgagcggcatcacctgttcaggtgtgaaaatcccggcaacaacggcagcggcaaattctccaaccgagtgccccaatacataatcaggctttaatccaagtgcctgccaatgtgccgccagtgcaatttgatgcgccacaattgccggttgtgcgtattcggtggtggctaatgcagcatcatgctctccgaacatgactgcttttaatggcaatgccaactctgatgcacaggctgtacagcaacgatccaacatagcggaaaaaacaggagagctggcatacattgctttccccatgccagaccattgacaaccctgaccgctaaattgccaaagttgtttactttcgctattgatttgcccactgaaaacattttgtgttggtttcttgttggcaaaagcggataaattttcagcactctgtggcgttagcgccaatgctaaacgccagggtaatgaaaaatcacgtccctgtaatgcggtccaagccagatctgcatgatgctctggtgcaccattgagtgcagccgcataacgttgggccaattgacgtaatgaaaattcagaagcagcagagagcaataaaggcgaagtctgcgcatgatggacacggtgacgacgtaattcttccggcaatgattgcacgacgacatgacagttagtaccaccaatcccaaacgaagagacgcctgcggtacgtaatgcttgtgtccagcgttgcccttgtgttgccagcctgaatggactttgttccaaccgtaaagccgggttgggttgctgaacattgatcgtcggtggaatatagccatgccaaacagacaaaaccgctttaatcaagctagcaatgccggcagccgtatcaagatggcccatattgcttttcactgagccaagatagcaaggcggtaacgccacactacgatcagaaaatatgctgcgtagcgcgtcaacttctatcggatcgccaagaggcgttcccgtaccatgtgcttcaatcatgccaacatcatcaatgctgacatcagccagttggagtgcttcgataataacgttgcgttgaccgttgaccgaaggggcggtaaagccaactttctcattgccatcattattaattgcactgccacgtagcacagccatgatgggatcgccatcgcgcagagcatcacttaggcgttttagcgtgacaacaccaacgccattgccaccataggtgccatttgcctggctatcaaaagggcggcaatgcccatcaggggagaaaatcattcccggctgatacaagtaaccactttcttgcgggaaagaaactgccacaccaccagccaacgccatgtcgcactcaccggcacgcaggttttcacaagccatatgcacagcaaccagtgaacttgaacacgctgtttgtaccgtcagtgccgggccttttaggtttaatttataagcggtacgtgtcgcaagataatctttatcgttactgattaacgcttgaagccctttaactttgccaacatcggtcatggaaaattgtgaccatgaaggccaagtactgacccggctgctaccaaaaacaccggttttcaacgggacatgacgtggcgcataaccggcatgttcaagagcatgccaagcggtctggagaaaaagacgctgttgaggatcgagcatctccgcttcctgccgtgaataaccaaacagcgaggcgtcaaattgttccgctttctctaatatcgctgcccgattgacaaaattttcactctcaatgacttcaagaggaatacctgcatctaataatgtttgacgggagagtggaacagtacactcagctccgtgttgcaggttatgccagaaagtatcgctatctggtgcctgcggaaagcggcaggcaaggccaatcactgcgacaggatcgcaattatcgtaatgagacgttaaatcagtcattatgcagctcctttatgacgtttttcccgttgttgcagacgcttctgttgttgacgctgacgaggggtaatcgactggcgatttccgtcgtgggaatccttccggcagcgcaaactgagcgtctctggtgttggataagcaaataaatcggtcacggcaagatgataaaaacccgcatgttgtagtttgctgtgcaattgaattagctgtagcgagctggctcctgcctcaaaaaagttttgttgtgcgttaataggatgatttgttatggacaagaacagacgttgaattttactgcatatttgagggtcatatccctctgaacgcaatgatggcgcaatggcaacagcagtattttcaaccatcacggattgctggcgtggcatcaattgttccagtgctgcatgccaactttctggctgagccgcaagggcacgcaatagcgtcatgtagctattgaacatgttttgcaactgatgtggttcaaacaattcttcgacagcatcccaatttagacaaagttcattatcagattcataaacctggtgatccaaccagatttgtggcgtttgggaaataccccaaacgggtttcatccacgatgaatgcgaaaggaattgcccttggtgtgttcccaatgcactggtgaaaacgaccggcataatggccgcatcggcgctacggctctgtaccaattcacgcatcactctaattgctgaaatgtgacggtgatctagatcctgccataactgttgttgcaatctacgggcacttgataaccaatttttctccgggtgccaggccagtaatgacagagaagtgaaatcacccaaaatgtgattgatatcttcatgccagtgtgggcgatcgaacagagtaaggttgagcgttaactccggtttagtactgaacgcagaaagaaccgctgcataagccgcaattaatagcgcggaaggcgttatttgataaggagctgcatgttgtttcaactggctccattcatatgcagatagccgatcgctatagcgcacaaaacgtggcgattgaaccttttccggggcaatacgcagtggcaattgtggtgccagtggtaatgttttcacttgctcctgccaatattgcagcgaacgctgatgtgctggtgcctgttgctggcgtagtacacaatcccggaatgtgactttcaatggtggcaattcatgctgctcgtcgagataaagctgttctaactcggccagcaatatctgcatgctcaacccgtctaatagcagattatccaagctgacaaatagccgggagacaatcccatcatcttgcgcaagctgaaaatcgaacactggccagctactggcatctaatacttgatgcgaaagctgttcgcgtaatgtatctgcctgcgtaatattggtgaattgatgttgtttgacggagaacagcgggacattttctaatgcctgttgctgcccattgacaaccacggttctgagcatgggatgacgctgaatcagacgatttaacacccgatttaaacgttgaacatctaactgctctatctggtattcaataaagaaatgcgcgccaacaccacttaaagcgaaacccggatggcgtccgaccaaataagcctgctgaacttccgtgagtgggaaaggctggtactcattttgctctttcggcagagcgcactctgttgatgaagtttcagccagaggaaccagtgtagccgcaaatgctgccaattgtgggttacggaaaagatggcccagctcacctttaaagccttgttgtgtcagttcaccaaccaaacgcgtagccagaagactatcaccgccaagttggaaaaagtcactgtcacagcccagttgttctgtattgagcaagcgttgccaaatgccggcaacggtttgttccaccgcattcaacaaggccatttcattctggcgcggtgctgtctctgtttttatcgcagactgtagttcttgcgatagcgccttacgatcaattttgccgttaggtgtcaatggcagacgaggaataatatgcaagcgctgtgggatcatatatcccggcagatgttgtgccagcacagacttaattttttcccgatcaggaatagttacgctgtcacttgtttgcatcaataacacactaaggttaccgatggtaattggcgtttcagcctgtagtggtagtagtggtaatagttgtggcaataacaataaccactgtgacgcagaacgtaattgaataccttgaggtgaaagcaattcagtcgtaatcagggaaagagacgatgcctgttgcaactccattgccaatatcaacgcgccgggttgagcaaatggtaccaattccttgagacaacgtgcaggatcttcttcccggtgtaatacattattcagcagaataatatcagcctgatgttgcagcgattcaggaacttgtttagaccaaccttgcactttagaccaatattgtactgatgcatgagcataaccgcttaaccgtgtttgcgcctgattgaccagtgcctgagaacgttcaaagccgagataacagagatgctgatcagtaatatgctctgctaaccactgcgcacagcgaccgctgcgagcatcaaactccatcaaagtcacggggcgttgtaatctctgagagaggatggtgatgacttgttgcaacccggtcagccactgctgggtttctggcaacacaaacaattgttgttccggtgcgaattgcggatcgtcaagtaatgcaaccgccgtctgttgcccggtaagaacatcgcgtaacacagtgtgccaacgttccgggatacctatcgcctgatcattggatgtagcgggtaaccatccggcctgatatatatacggtgtagattcaaccagtaccttacattggcaaagatatgccaacatacgggcaaaccagtcatgatactccgcttggggctgatagtgtttcaagcaatctgtcagtgactgcggtgaagtaaaggtaataccgtgacgagatagatgttccagcaggaacatggcaacttgaggttcactgctatctgcggttattgcatgcattgcggggaacagctcacgatagccagcggataactgcggtgcacgattgatccgttggcataaagaatcaccttctaattcaaggaacgccactagcgacttctctttttcgccactggcgagtgccactcctttactaatcccagtgacttgattaagggccgcatcaatttcccccaactcaattcggtaaccaccaatttttacctgactatcacgacgtcccagaaattcaagccaaccttcaggatggtaacaacccagatcaccggtgcggtaccagcgttccccttgatcgacaacaaattgagcggaagtacgttcttcatcattaaagtagcctaatgcgacaccggagccaccaatccaaagctcaccgacaacccaatcagggcaatcacgaccatcttcacccacgacacggtagcgctggttagctaaaggatagccatacggaatggagcgccactgtgcttcaactgctttgacgatatattcgtttgaccaaatagccgcttctgtagcaccgcccattgcactcaaaacaccatcaggattgaaggcgcggtaacgttcaggcagtgacaaaccgatccagtccccggacaacatcacagtacgaagtgctttcggcgcatcgacctccatgccttcgcaataggtcagtaacatatcgaacagtgcgggcacactattccacaacgtcacatgatgacgcgcgatcagcatttcccaagttgatgggtcacgacgctgtgcttcattaattaataccagcgcacctcccgcggtgagaataccgaaaatgtcataaacggagaggtcgaaatgtagagcagagagtgccaataaccggtcgctactttggacctgatgacggcgattgatatccaaacaggtattgagtgcgctctggtggctgataacgacgccttttggtataccggttgaaccagaggtatagatgatataagccggatcagtaaccgcacgcttaaccatgtttgccaaaggcggccattgctcatcctgatgccaagaaacacaatgcacatcttgtgaccagtcatcaccttgtttttcaagatcaatgtgttgttcaggatcaatgataacgacgcgaatcccagcactttcgcagatagcacgacgtcggtttactggctgatcaacaggaaccggtacataaacgccgccgatataaagtatcgccaataccgcaacaatttgtccgacacttttttccatgctaatggcaacccgatctcccggtataaccgacattttttgcaacacggttgctaaccggcgagcggccaaacttaattcaccataactgatttccttattattagtcaccaaagcaacaatatttggtgtgcgttctgcctgcaaaaacaccccttcatgcagaagagcatccggcaaaggttcagttgtgttattgatctgataccgcagttggtattgcgatttaggcatcagatccggtaattctttactccactgtgtagcgttttccgttaaatttccaatgaacccctgataggcagtaaataaggtatccattaacccgtcaggaaagagttcatcgttactatcccactgaatattcagcgtgttttcatgttcaaatgcaacgaaatccagccatacctgaggggtttgtgatattccccaacttggttttcccagaacatcacgggtattttcaccatataaaggtcgacctaaattgctggtaaacacaattggcgcaccatgtggatgactaccgcgttttttaagttcacgtaaaacttctacaccagaccaatggcggtgttcgtaagcttcagcaaatgttgcttgcgcgtcttgagccagttggcagaacggcaagttatcagcgggaatatctaacagcaaaatattagtaaagtcggccaacaggttgtcaacttccgtgtgcaatggcgctctgtcaaacaacgtcaggttaaacaacagacggggagcatgattccagcgacataataaaccggcaaatgcggttgccaatgccatcgttggcgtaacaccattttgttgagcaagttgtttaaaacgttgccaatattcaggagccaaacggaagcatctgcgctgaatgcggacgttttttattagggaaggttccttagccagagggagttgaggggcagggggaagggtatctaaccggttacgccagaatatctctgcttcttgtcgagcctgcgcaaattgcgcctgatattgcaccaaatagcggcaaaaatcgtagtcagaaggaataaccggcaggttgcgtttaacaattaatgccgccagttcagtaaagaacaggctaaaactggcggcatccatgatcagcaaatcaatattagcgtgcaaccggtgctgattctctccaaacagacttagctgaatatcgaacgtttccccttgttcaacctgtaatacccgatggcttagttgttcacgtatattattcagcgcttgtcgctgttcttctgctgtaaagctgcgcaggtcatgaaccgttaattttttccaataagcatcggccatcccttgctggcgaccatcgggcaaaaaccgcactcgtaacatcggatgtcgctgaatcaacttatgaattgccgcttccagtggttcaggctccaacccgataccgtcaaattcttgatataaatggcaaccgactcctcccaatgtctgttctggcgaacgcccaacaaaatacgcatgttgtaccgcagtcaacgggaacggacgagcatccgcaatcaatggctgcgccacatcaggcttaagtgctgtatgagtaacaggcgcatgacgttgcagaagctggctccaggcatacagtgtgggtttttgatacagttcacgaagggtgacgcgatatccctgacgcctcaactggtttaacaatgccatcatttgcattgagtccagccctttgcgaattaaatcatcgttatcatccaccagtgtatttttttgagtaaacaggccagatatgatctgacgcagtgaatctggagagacaaaatccttgtgcatgaagatatcctataaataataacggttacgaagcggtgggggttacaccttatttggcttatttggatatagatgccagtgctcttctgagccgagatggttttcccaaagagattgataaagtgaacaacgcgctaacaattcgtcatgagtgccgctatcacaaagggttccatgatccatcaccaatatctggtcagcgcgggttatcgtgctcagccgatgagcgataacaaaaactgttttattccgggtaagagaatcaaacgcctgttgtatcaactgttcgttttcgggatcgagagaagccgtcgcttcgtcaaggaataaaaccggagattgctttaaaatggcacgggcaatggcaaggcgctgacgctcgccaccagacagcgtaccgccatccacgcctagcggagtatcgtatccttgtggtaatgccaaaatcgtatcgtgaatattggcaagacgagctgcttgttccagttctaattgggttgcattgggatcacccaaccggagattgttagcgacggtatcctgaaatagtgcggtttcctgaaataccatagtcacggtgtcatacaatgcttgggtttggtaatgatggatatcatttccacccagacggatttctcccttatccagttgatagaaagagagtaatagataagccagtgtggatttcccactgccactgggtccgacaatagcggtcatactgccttgcggcgcataaaacgacacattttggatagcgggttgattggtacctggatagctaaacgaaatgtcattaacttcaacatcatatttgtctggcgcagctagtggcccggaagcttgcgttgcaacggcttctatctctgcaatatgggtttcacctacttgcgttaaggccgtaatattgagtaaggggatgatcccacgtagaggggtaatcgtggcaaacaacaacagaatagtgataagtatttctgaaagtgttaatgcttctggtgaattaaaacgcagagcaccagccagaatgccaacgaccacgctggtatcaatgatgatgtaaaacaggctcagtagcggaatacttctgaataccccgcggcggaatgcgacacgtaattggtcgatttcgcggtcaaaacgctgttctaccgtcgtggttgctgccgcagcacgaataaaggacataccttgggcgtactcaacgatagcttcggatacctcagccatcatagtggcacgcaagcgcaatatttcattcagttttttacggatagctcccaagatgaacattccaaccatcagcactaataatgcactaccggcaaccacccaatcgaaccagaataaagctaagtagatgagagtcagcatcatcacctgacaagcgatttgcggtgtggtataggctgactgattttcctgccattgcacatcttcagataacgtcaacgctatttttccagcgctcaatccccgaatagtggcgacagacatactgacaaggcgttgtagcagagagcgacgaatttctatgcctaaaccataggcggcaatggtgagtttacgtaatgcgcgagccataaaagtaaatcgcagcaacaataaaataaccagtaatcccaaagtgataagcggcaacataggattgtcactttcccctagatgggtaatagcccaggcagcaatagccagttgagccataatcgcaacggtatcaaactgtttatataacaatcccttaaaccaaactctttgtagttttggtgatagatgttgctggagacgattaaatagccccatgataatttgctcctgtcccggttttttctccccgccaagcagcccactgtctggcgtatgcaccttgctgtgcggccagttcatcatgggttccttgttcgataatctgtcctttatctaaaaccattattcgatcaagatgacggatagtcggtagacgatgggcaatgacaatcacagtcttattgcggcataaggcattgagtgcctgttgcatctctttttcacattctggatcggcataggctgtagcttcgtccaatacaagaattggggcgtttttcagaatagcggcggcaacggcaatacgctgtttttcacctaccgataaactcacgccaccgttcagtacggtgtcgtagccttgtggtaattgctgaataaattgatgagcttgcgctgcggtagccgccgtttcaacttcggccagtgaggcattaggacgggctaatcgtatgttattagccaccgtatcgttgaacagaaacacccgctggaaaacaaaagagacgttattgcgtagcgtcggttcatccatattacggatatcaacaccgccaatagtcacctgaccatgctgagggtcccaaagacgtgcgataagactcgctacagtagatttacccgaaccactggcaccgactaaagctaatgaactgcccgccggtatagaaaatgaaatgttatttaatgcattcccctgcttatcttggtaggagaaactgacattgtgcagggcgacgctgtgatcggcgggtgtttggctttgggtgcaaggcgctagttcaggttgattcattaaccaacgataacgtgtgatcaacgcctcttgctgttgcaaacgtgtcatcacagcgaacatggatgaggcaatattaccgaatgccattgccgccaaaataaagaaagtcaattcgaataaagtgatctcttgtcggttcaataaccagaccgccaaagggaggacaaacaacaggttagcactggataacacgaaaaaccggctggatttgacctgcactttctcaacccaaacgtcaataatccgagtcagggcagtaaacgctttctcagcgcgttgcaacgcaaccttgccgcctgaataggttttgaccacaggaatcgcattaataacttcacccattgttgaagcaatacggttttgggctgcataaaaacgctgagttgtcgtttgaacttttatctgaatatagacaaataacaagcaggcacccaaagtcggcgcgaaggccgccaaggctaaccgccaatcaatggctaacatgacactcaatgcgatcaatggaccaaataaggtagcagacatctctggaatgatatgagcaataccatcttcaagctgttcgacgtcatctagcatcatcttttttatttcagtgctgtcggtcagcatgaaaaagcccaaaggtacagacttcaacttactgctgatattgcggcgaacatcagcttgcacatcggcagcaaccaaatgagcaaaaaacgttgaaccactaaaggtcaacatagcggcaaacgtgaatcccaataacataacgccataattcaatagcgtgtcatattgcccgtcatagatagattgggtgatgagcccggcaaccgccgccggcaatatttgcaggccggcggaaagaatggcaagtgcaatagcaacgtaactcaacgtgcggtatgggcgcatcatgtaccataactctttaataacgccggcatcagccgcacgctgctccggcgaactctgagcagaagtatcatgattacgcattcacgctctccttgtggaaattatggaacttacgcaatatccagaacaaggcaatgaaagtgaagagaagtgcaagaacgaaaagggcagaatagcctgctttagtaacaatcaatccacccaacactgaacagataattgcaatacccatatctgcggattgcatcaatgcaaaatccacaccggactgagcacccgcggcgagcgacatcatctgggtatacagcgcaacaaatttggcggcagtgattaaggtgatgaaaacatatgcggctgaaagcagggataacggcgcttctggttgccgggcaagccagaaaataccggctaatacgatagattcaagcagtatgacagacagtaaagtctggacagcaccgaatttacgtacaatgatgccaccaagcagaacaccagataatccagctaatgcaccaccactggcggcaatgataccaagttgagttaaatccacaccgcgatcgatcaaaaacggcgaaagcataccaagtgaaaggcgcgtaccgatcatacacagcaatatcaaaaccaatgcttgtctaaccggtgcccgacggagtgcatttttgagagaaggggcaaccggggcttttaaaaccgttggtgctttttctacctgtgtttcgcgtaaaaatagggcaggcagtgacatcaatagaatcacgatggctaataccccggcaccaatgtgccaaccatacagtgaaaccaggtatagaaacagaccgctgccaatgatagaacccaaataaccgccgccaacttgcataacattgcaccaagggcgatgttttggtgataaccggtcaatagcgtgaccatcggtggtggtatccaccaccgtcaggcaaatggtgattagaaatagaccgacgataatcagcggcatatgttcggcaggttttgccagtgacattgcacaaaaaagcaaggtaattaacagattaccgcaaatcatgatacgacggggatttgtatcccccgaacccgatttacgatagcgctctataataggtgcccaaaggaatttgaatgcccaaggcagcatcaacaagtagagcaagccgattttatccggggttacgccgtggctacgcaaaaacgctggcatactttgtaacgttaacatgccgatcgtactttggagggtataaacccctgccaaagtcaataatagcaacgatatatggcggggatgggagatattatgcgtcatagtgagatactcacatccagcccaacattcaagcctttattgatcatactgagcgtatttggccccacggtgaaacttgagacacgatactttttatcgcccagattttcgccatagagttttacattcaccccatgtgccatttctaaacttaatgatgcgtcatagagggtgtatcccccctgttcaagagtattcgcttcattaaagtagctttttgaatagtagcgggcaccggcatttaaatagaggttaccgggtaacaatgtttgatcaatcaagtagtcaaaacttgcattaagcatgacatctggcgcataaggcagacgtttattgtcataatttatgccattctctgcatcggttgcatcagtgaagtttgatttgcctacgcttcctccaagagaaaatttcagccctttcattggcttaatctggctactcaactcaatgcctttgctctctgctttacccacattgcgtataaactgtgcaccgatcggaccaacataaatttgtttatctttcgaacgaatgtagtaaacagcgctgtctaatgtcactgcattatcaaagaacgaggtatgccagccgagctcataattatctgaggtttcagtattgtagggtttgctatcattggcggaggagacaatgttattgaatccaccgggtttgtaccctttagtggcagagagatagaaacgggtatctggcgtcaattgccaacccaatgcagtcttaggtgtaaactccttgctggaaacttggttatcaaaagcttcgattgctgccatgccagaacggcccgcatagtctatctgcgatttttcatgggacaaacgaccacccagagtcaaatcccactgagaagcaaagggtaatttcacctcaccaaacagtgccagcgattttccttttattgtgttagccgcatcgccatagtaaccgggataaccactggtatgatgtttattcttttcatctgagaaccagccaccgagaacagtggtaatcccatttgagaaattggagttcaaacgcagctcttgcgtagtggcatgatgtttctctttccatttaccaccaatgaaatcacggtaaatatcgcgatcctgataagaagtcacactggttaacacactgtcgccgaaatcatattcagccttgaatgcataactgttaacccgccgggttaaatcagggatagggccatcatattctttccgacgaaattgttcgtcgtttaaatagagttcttcatgggaatcgagatcttcatgagcaaagctaagttcagcactgaacgaagaatcttctggcgcaaatgtcagttgccctcgaccgagccaggttttgctggaatcaatatttttatcgccacgatttggtgcatcaatttgcccaggctcttttacccaacgcaggctggtactaccataaaggagatcttcaataagcggtattgatccgctgaaagaaccaccttgtttcaacttggagtaattaccggaaagattaagccaagggccttcttgcggcgaacgggtgacgatattaataacacccgcttgtgcatttccgccatataaagtcccttgcgggccacgtaatagttcgacacgttccacgttgattaattcttgtgttaggaattggtgatcctgaggaacaccatcgacataaattcgaacagaaggcgagtagaaatccggtgaactaataccgcgaatggtggttgctgaataggttctattacctcgtgagcggatttgtaaaccagggaaagcgcgctcaagatcttgtacttgagtgataccggcctgtacaagttcctcgcctgttttaaccagaacgctaccatccactttatttaacgcttcttctcgtttattggccgttacaatcaaagcatcttctgtcgcgccagacgaatgttctgcccataccacaggcgaaattaaacaacataagacagacgccctagcgtatttttttctcatataaataactcgttatgcactgtttaaatcatgttttacgaaaattaggtgtggtaaaacaaaaaacataacgggagattatcgatagtcttccatcagggctaacggaatagggacaaaagtagcgcattacgtactattgataatgattctcattaatgataaattgcgttatatttacaatcagaatatatatacacagtaaaaatataatgtctttaatatgtaaaaaatactgttttaagtacggaaacaatttttaactagcatctaatgctaattctacagggggtctcatgaagacaatctatagtgaaaaattagaagttttcactgctgattattgtaattattcacatgaggataaaaatagtaaaagtacacctgtactgattgaggaattatctgacggcattcacataaaccggctacgctttgaactcaacaaagatgtcacagaatattgtgaagggccgccaacggtgtcaattgcgtttattttaaacgggagaggaaaaatggcgattgaaaacggtgatgaattagatattcattcgggaatgatgatatttttctattcacctaaaatgacgcgaggcatgaacttctttggctgcggatcatggcatatactcgacattcgtttttcattgaacgaaattgcagctcaggaattgccaccttttactcaattagcggcaggttttgaaaagaacgccagttacagtgatgtattgatgatggcatctcccatctacccaccatttatgcaaatagtgaaccaaatagaagagtgccaattaagtggcaatgtaagaaaggtttatttaaaggcaaaagcgttagaaatactcgcttgtgtggcgtctcaagtttatgattgccaatataatatggtcaacgggttacaacgccgcgccgtttataatgcaataaaaataattaacagtgattatcattacccttggacaataaaatcattatcaagagcggttggtttaaatgaacggaaattaaaagagggatttcgtgcggttgtttttcgcactttccatcaatatctggaaaacgtccgcatgacgaccgcagaagatttattgaaaaaaggcatgagtgttattgatgtttctaccgcagtaggttacgccagtccaagccatttttctaaacgcttccggcaacattatttgatcaatcctaaagcatggcaggcgaaatatgccgttagtcacactttattaacagaaaatatcatggtcggaaaataaatgaaaatctctgttttaccatgttgactatttagctgactctaaaaaaagatggccattttgacatggccaccccatataattggggtatcgcatgatttatacccgtcatctttcaagttgcctctttgttggctgcgctcactcaccccggtcacatagtttgctatgctcccggggattcactcccttgccgtcgcgatccatcttgaaatccattgggtatatatacccgtaatcattgaagatgcttgattttatccgaaatggagatcattatcctcgctatgaaaatatttattacatcagaacaaaaaatcaaacttgaacgtcttcacgacaccactcgtgatggtcaggtacgagacagaataaaagcgatccttctggcttctgaagggtggagttctgtgatgatagcccaggcattgcgactccatcagaccaccgttgaccgccatatcagtgattaccttaatcaaggtaaacttaaatctgataatggagggtctgatagtttgctttcccgagaacaaactgattttttaatcaatcacttatctcaacatcttttccatcacacccatgaaatcgtggcctatgttgctcagctctggaatattacctttagcattcccggcatgaataaatggctacaccgtcagggtttttcttataaaaaaccttgtggcgtccctcataaattcgacgcagaaaaacagcgacaatttattgaatattatgagaatcttaaagtcacagcgaaagacgaacccatcctttttcttgatgctgttcacccgactcaaggcaccaaactcagttatggctggatgcgaaaaggcgagaaaaaaaccgtcaaaacaacaggaagccggactcgcctgaatatattgggtgccctcaacctgaatgccattggtcgtacggtgttccaggaatatcagaccatcaacgactacaacatttgctgttttttcaatgaaataagaaagtcttatcctgactatcatcaaaaaattcaccttattgtggatggagcgggttacaacaaagctcatcttgtgaaggagtgggcttatgttagcaatattgagttacattaccttcctccctatagtccaaatttaaacccgatagaacgattatggaaggtcatgaatgaacaggttcgaaataaccgttatttcgcggataaacatgaatttcgagacaacgtcttcaaatttttcaccacaacgctaccggatatagcggactcgctgatgtctagaattaacgaccattttcaggtgctaaaaactgcatcttgaagtttcttgggtatatgttatgccaatattatgttatccaccgataagctatccatgctgacgccaaccagagtgactgagttttgcccgaaggtaaacaccagatcattatccaccatagaagcatgatccagataattacttttatcactgctgccttcggtacccaagaacaccagtttatccgtcttgttgtaaccatagatgatgtcttgtccaaaatcaccactgaacaggaaggtattgttattaccctgacttttcagaacatcattaccttcaccaccgacgaagacattattgttgccgaagccgatcaacgtatcatcgccatccagaccgaacagccagctaccggaggttttagaagtcagagtatcattcccatcgttgcctgtgactgaattggcatatttcgtcttcaatccgctgttggaatacaaaccatcggccctgacttgagaatccacctgtttagtcaaaaacagccaggtactttctttacttcttatagtggaaatatccgtagcaatggtgataccgccttgtgcatcacgcatatacaatgtacctgcctggtcataggctatttctgcattttttagtgacttctgtaagtcaaaggtattatggcctttcccgccggcaacaatgttaaatccgccatcatcacggaagatatcattgccgtcgcgcccttccagataatcatttcctttaccacctttaattaggtcgttgccgtcggtaccgataataaaagtactccccgtgtgtttctcagcattccggttcaaatcctgcacccaggtattttcacgggtgacgttggaaagattactgacaacaatagtagagtctttatgagtcagatcgtagaacgttgaatccataatacgttgcatgccgctctgataaaatggcgtcacatgcgaaacccaagttgacggattagcaatagagaagggcaagacattccaccaatctgacgcataatgatcgttaaaattaacaatattatttgtcgccgaatcccttggtacatcgtgaacacccggagagaatgaatcaacgctagtgccgtttaatacgcggaatacgggatcattctcgtatcccacgttcagcactttgttacctttctcatactgtgatggcgaagcgaaagagatataattcgactgggagtagaatcccccccattttgtatcgctagactccgccatactattcacagctaacccacccaaactatggccgctgaccaaaacgtcactgcccgtcaaaccatgagctttggcataattagcgacatggtccagcagccgaccgaaagcgtttggcgcgtagtcattcgaatagtctttcttacctaaagcgaccaacacattattcataatgtcgccgaatgtatcggtaataattgactctcggggaccactcgtaccgcgaaacgcaatgccaatagaaatcaaattaccatcagcatcatattttcccattacctctgcctgagcagtggaatgacttgatttttcgccgaaaaaagtaccgcgggcatccgttttgccctgataacctaactcatcagcactgatagtaaaccatcctgcgtcattgagtttatcttgtgcttgcttttctgcgtccggattccaaggcaatttaggtgtgatgccctgcgatgtcgtgctgccgagaattgcggtcaacaacgttaatggcatccccaaaccaaaaccataattgtaatacccctcggcaaatccgctacccagattatggtaagcatacccggagatagtttttgcgtcggaaaataactctttggaagtagtgtcatcaaagtctttgtactgaaaaacacccatgatgcatatccttattaagttaaaataaagttaaaaaagtgttctaaaagtattaactgactaggtaagtatagattgacggagatcatttaaagagtaattatctaaaaatttataaattagtgagccataatgaaaatttaatatttttacaaaactttaattgaataaatcaagtttatatgctaagcggtctcgcgagtgagaataaacacgctgacatatctattatcatcgttgatagttttctaaagtgactaaattaatgaagagctatagtccataacattataaagagagattggttaattccatttagtgcacataaaataaatataaacatgtaaattaagagaaaaaactcttatcgctgattcacttaattggttagaaaaagaaaattaaaacccgttattctctataaataccttattgattagaatagatgtttaatataatttctttaataagaaattcacaaatacaatatattgactttctatttaacaacgaactttataattaccatcgcattaaattaaagattatttaacattatatcgcagattaaacacaatacttataatgataaaaatcgccataataaaattttattaaaaatagtgcgacattaattttttctctctataatgcgtttttttattatctatattacgagttacgagaaccaaatatgaaacattccccgttgcggcgttcgttgttattagccggtatcaccattccattggtcaactttgcttttccggcatgggctggcagcggccagagcaagaggacgtgaaggcggacgttcttttaaactcacaaaatctcaggttcgcttgccacaagcttccatgaagagtagagattgtagcgtatctgaattatgtgaagagcttgggattagcagacagactctttataagtatgtagggccagatggggaactcagggaacaatattttgatctaggacgaccaaatcgatattctcactctgaaagcgactggcgatttgcgataagtaatccactgaacgcgcgagtctgtctaactttgtcacgattaacgtatctgatgtggcacacaataaaggggcattttctgcccctttattgtgtcagatatatttgacgataaggaaatatggcgtatactttaattatcgaagtataaggggcaaaggaatgataactgtattaagtacagaaacatttgataactggattgatgccctgaaagacatcagggtaaaaacaaagattcaggcacgaattcgcagactgaaaaacggtaattctggcgatatagagccagtaggggaagggttttcagaaatgcggattcatgaaggtaaaggctacagggtttatctaaaaaatcacggaaaagtaatcgttgttttgttgtgtgggggagataaaagtacacagcaaaaagatatagccagagcaaaagccatttacaaagagattgagggggagctatgaaactgaaagaatatgatattgcagaacacttaaacagtgaagaagaaatgcaaatgtatcttaatgaaattatggaagatggtgatccggcattggtactgtctgcgctgggtgatattgccagagccagaaacatgagccagctttcaagagaggtcggtatgtccagagaagggctatatcatgctctttcaggaaaaggtaatccaacattcagcgctatgatgaaaataacaaaagcgttagggctgaaacttcatttcacaggggcttaattgatctgcaccccaaaagttggacgctatacttcaacttttggggctctttagccaacgggtaagttccccggtcttaaacctaaaccctttcacaacgctgaaacgcatgaacatagggtggcccttttcattcattgaaactgccgcaacgaaagggcatttcccttttgcccctcgccctcggggaccgtgctgagccccgccccagtatggctgtggctcagcggtgtgcccggttgcatattccaaatccatgctcagagcgtgatgcacttatcgtctccaccgcgttggttcatggtatgactgtcgtcacacgaaaaatactaaatccttgggtttaaggatgatgaaatatttaaatatgcatgttgggtagtaggtataaaaccggtagtggtgattatttctcattagccgtcatctgtctgattttaatatccggcctctttttgatgccgtacagcaaaaattgttgctgtttcaccctcaatccgatacaaggcgatatagccactacttccaaaatcaataagccattctcggaatgccggatccatatcgtcagcagggcgtcctgcttcaggctgacgtgccagcattttcacgccagcacgtattgttttaatagctcgacgagcagtgtctttgtcttttttagcaagaaaaccatagagccgctgtatatcagcgagagcaggcggagaccaaatcaaacgtggcattcaggtaactccgcatcttctcctgcttcgagcttagctaaccagtcgtccgcttcttcaagcgtcaggtgtagtccattctcttgatacgcttcccaagcacgcaatgcatcctgtttgaaagattcacgcttttcctcgcgctctacatagtcacgtatagcttcacgcattatccaatgagctgaacgatgtcgcacttctgccaaatactggatccggcttttcaagttatcgtcaagttttactgaggttgccattttcttccacctaaatattagaaggtaataccttttaatactatatcatgaaatctccgctttactactaggtaaaaaaacctccgtttttcacttgcgcttggcacgttggctgaatttgaacgtaatctacgccgccaccgcgttggttcatggtatgactgtcgtcacacgaaatgtgattgattttgaattgaccggcgtgccaatactaaatccttgggtttaaggatgatgaaatatttaaatatgcatgcttatattaaataagaaataaacatgcatattgagatatttattgaaaataaaatcaaagcagaacattgaaatattattttacaaatttgaaaaaacatttaccaaatcattgccatctattttttatttccgttattattcaaataaaatcattttcatattttaactttattgtcatataggtttatttttcagtgaaataataattcacatgcattattttttatttcattcttatacaaaaataatcaatcctgtaagttataaaaataatccattattatttttttgaactaaactatgattatctccaatggatagagttatctatacaataattcaatgtattaattacataagaaaataatttaatttaagagggatgtatgagcccaaaaaatgattttaaacctttttccattagaaatgattctaatatagtgagtcaagaaagatatgaagcagataagagtttgcaggaagggtttccaccagacaatatctctacgcatgtattaaataagacattacgccaatcatcaacaatagcctctgtggtagctaattttattgcgacacaatctggcgatgatgttctggatgatggtgatatagataaactcaccacccaactaaatcgagcattaaaacaaatagccactgatggcaaagtgcctaatagccggaaaataaatggtaaggcgttgactgaggatattaatctgaatgcgagtgatgtgggagcatatactagaacagaggtatacactcggtcagaagtatacacccgagcagaggtggatagattgattaagacaaccagtgagattcctgttggtgctcctattccttggccattgccccatccacctatcggctatttcacttgtaatggttccgcttttaataaattacagtacccaaagttagcagaagcttatcctgatggcagattacccgatttaagaggcgaatttattcgtggttgggatgatgggcgcggtgtggatgctaagcgtgtaattttaacatctcaagaggatgccattcaaaaaattacgggaacatttacaactatcagagctgttgttattaacgccgctggagcattttcacttggggatagtacacatagaggcaatacacttgatgggggagactacggaagagtggtcaatttcgattcatcacttgtcgcacgcgcagccacagaaacccgccctcgaaatatcgcctttaattacatcgtaaaagcggaataataacacaagaatatatcttagatactggaatcgccatagccatattagttatgaataatatcatcgtttatcatgacacctggcgctagcaaaatcattttcacggataataaaagctcatcaggtaagatgagcttttattgctttctagacacgctcgaagtttggattgagcatcgtcatcatatttggaaaaccagatgacaagaatacagttcctatgctctgaaaaagtttcagtatgttatcgatgaacaaattcatcatcagaacgaggcgcttctccacctatccggaatagggtatcccggaatgcttttatatcagcagctttggcacggtctgaaaaaaattgctcagtttccagagcagaaattttttccgcaactgcgatagcaataaactggttaacgctggtacgatcacgctttgccactctggtgacttcctctcttagagatttcggtaatcgcaatggataggttgatgtttcactcatttctcactctcctaatggcaatggccggtgtcataacctcaatattaaacgttccaaacacagtaccataataaccacctcatgcaatccctgaaaatcaaagagttcgcttaaagttaatggttaatataaatcaggttgatatttcattagcgacaaacttaattagcttaaaaaaacaaaatcaaatatcaataaagcgctgtttttaatcagcgcttttatctaataaaaacttgcaaagtattttattttctttctacgactcatccaagattaaatcaaactctaattccatctatatttctacttttctgactcgtcagattctgactattaaaaacggcgatataaaaaataagacaagtatgaaaatgcatttttaccacaatgtaccttatcgattttttaccataaatacaattagttacagaataatataaaatccaaaacattatgtttcactctacggctattgcattaagtcaatatccgtgagaatttattccccgccgaaatacggtgggttttgaatatcattaaatgtgtcacagcatattaacttactatcaataacgttaattgatctcttcatctatttctcatcttaattcggctacttactgtctatctcataatacttactgaaatagaccattaatcaggtttggtgcggtttaacgtaagtttgcacttcctgtcatatataaaggtaaaaggtgccatgaatactcaacgtaagcttgataaagtcagaccgccccgagttcagattacttatgatgttgaattaggtggcgcggtcgagaaaaaagaattgcctttggttattggcgttattgggcaatttgctgagcaatctattcccatgcgtgaacgtcgttttatgcaggttgataaagataattttaatgcagtgatggaaggtttatcaccttcattggaattacaggttgaaagtgcgctgccgggtcagagcggatttatgaatgtcgatttgcaatttaaatcaatggctgactttaccccagagaatttggcgaaacagatagaaccgcttcgtcatttattagaggtacgcggcaaactcagtgatttgaaaggccgtgcattgagcaatgaaaaattgcgtgaccgtctggcggaaattctagctgaacatgcggataaattaccgcaagcaaatgaagaagcagaaaccgctgccatagaaaatagagcagatgacgtcaccccggaaaatagcaatatcccggaaaataacaatgcacagtgagggcagtatggaacagagcgttgttgaacaacaagaattgaaaacgacggaaacaagtggtgattttcttgatcaaattattgataacacccaagccattcgtcgagaagccgatcgtgatcgggtaaaaagccagctcgaccagtttctggccgaagtcacctccggttcactggtggtttccggcgatttggtaaacagcattgacgaacgtatcgccgcgattgatgcgctgatgtccgctcaactgagtctggtattacatcacccggaatttcagcgtctggaatcttcttgggtagggcttaaaggattacttgaccaaagcgaaacggataatacccaaatccgcatgttgaacgcgacgaaaaccgatttgattaaagattttaaatcggcatcggatttcgatcagtcaatgctgtttaaaaatgtgtatgaatatgaatacggtacctttggtggtgaaccttattccgcatttgtcggtgattttgactttgataacagcccggaagatctctacttactggagcagatttctcatgtggccgcagccgcccatgcgccgtttatcagttcagtcaacgcgggcatgttggggctgaatgattttggtgaactaccacgtccacgtgatttatccaaactgcttgcaacatccgattatctgcgttggaaacgcttccgggaatctgatgactctcgttatgtcggcttgacgttaccacgagtaattggccgtttgccttatggggcaaaaaccatcccggttgaacaattctgcttcgaagagcaggtaaaagaaggggatagcggtagttatctgtggattaacgccgcctatgcactggcaggccgtatggtggctgcatttgaacagtatggttggtgtgctgcgatccgtggtgtagaaggcggaggattggtcgaagcattgccagcgtatcactatacctctgtgtccggtgaaaatgtgctgcaatgcccgactgaggtggctatctctgatcgccgcgaaaaagagttagcagaattagggttcattcctctggtttattataaaggaactgactatgccgcatttttttcggtacagtcaccaaataagccgagaaaatataattctgacctggcaaatgccaacgcaaaattatcaacccaattgcaatatattatgacaacatctcgtttcgcccattatttgaaaatgattgtgcgtgacaaagtgggcagttttatgtcccgcggagaatgtcaatcttatctgcaaaactggatcaaccaatatattgttggctctgataccgttggtgcggaaataaaagcgagtcacccattacgggaggcaagagttgatgttgttgaagttcctggatcaccgggaacatatcgggctgtagcctatttaaggccgcatttccaattagaaggattaagtatgtctttacggttggttgctgatttaccgccatcatcggctgcctgatttttctatttattaatatttatcctatttattacaactaactggagtagttaattatgagttcttcaatctttttacaaattgatggtattaaaggtgaaagtaccgacagcaaacataaagagtggattgagctggaacatgtcaattttggtctatttaaccatgcacgtattgcagacagcggtaaacgtaaaattaccgttggtgcagcagatttccgtaccattgactgtgtgaaggtgatggattccagttctattggcttactgtctgctgtggcgcaaggtaccgcgattaagaaagtgaaactggaaatctgcacgattttcaaaggcgaaatgcatccttatgcggaagtggaaatggacgaatgtattatctctgacgttcatgaaacctgttcacgtggcggtgaattcccacaagaacagatttctatcgcctattccaaaattaaatggacatttacaccactcaaagaagacggaactaaaggaactaaggtgggaccggaaggttgggatcttatcgagaacaaaaaacaataacaattaccgtttactgtcggcctttggccgacagtttctagccggaaaaatatgatgactcagccttcatttcttcatcgcctgaaagatgattatccacaagatgaaaaacagggtgtcgcacttatctggtcacgtcaggaagttgtccaaagcctgatttctgatttaagtatgttattttcatcaagaccgatttctgaaatttcccctttatttggtgagttgccgaaatcagttttaaattatggcgttcccgatgtcattaatgtggatatttccgatgatgaacgtattgatgcacttagcaataatatttaccaagctatttcctggttcgaaccccgtttgaaaaatgtcgttattacattacaaaaaaatacgccagaaaatatcattttctgggtgagtggaattttcctcgacgaacaagtggtgttttctatctcatggaacagtaccgcatatacctattcaatttcatgggataaataacaaaatgatgttattaccacaaaaaatactgacttattacaaccgggaattgagttatttaagacaatatggcgctgctttctcgcagcgttttcctaaaattgctaaacgtcttgggttcgcagaaggtgtttcagaagatccgcatgtagaacgtctggtggaatcttttgcatttctgacagcaaaaatccaccagcggattgatgaagatatgccggaactgagcaacgccatgttagaggtattagcgccacagtttctacgtcaggtaccgtcggtatcgttggtgcagtttcaacaggacctgttaacatccggtgtgaccggaatgatgacggtagcgcggcatactccgttgatttctcaaccggtaggtgatgtgacatgtcgtttccgcacggtatatccgctggagatgttgccattggatttaacgcatgcagaactaataccagacccttacgatcgggatttcatcttaacgctgaattttaccttgtggccgggtgccagctttcaggcacaacatatccggttgtacttacatggcgcgccaatgctgacccatagcttgtatgaattgttgtcggcccaagttaagcaactggaatgtcggttaggcgagcgtacattcaacctgaatcgccgaggtgttcaggtggtgggctttgatccgcaagataacttatgtgccgatgatccattgataaatccggttcaccacttgtttcgtgattatttcagtttcccagaaaaattcttattcttggatattccactaccggatgctggtttgattacccgttcattaggtgagctgcaataccgttttcggcttaaggattgtgtcgcattgcgccgcattgaacgtatgagtgataaagtcagcaacgaaaccttccggctaaattgcgtgccgataattaatctgtttcctcatcatgcggaacccattattccactggaaacagagcatgaatatctggttcaaccggatgcgcgtcgcccacaaagtatggaagtctataccattgatcaggtcgaaattgtcagccgtcagcaggaacaattaagttccaaaccggtgccgtcattatttggtattgggcatacgcaatctgacgaacagttctcattgttttggcaggcaacgccacgtccctcactcagacataacgatcttgggatgaatatgttcatcggtttttctgatagcagtggcgaacatctgaaacccgaaaccgatgtggtgatcttgagtctgacctgtactaatcgcgatataccgcggcaattaagcaacggtcatcctgatggggatttcgaatcagaaagcgcgttgccaggggtaaaaattctgggattgatccgtccccgattgccggtacgtccacaacccaatagtgcattgaactggcggttggtatcgcaactcaatttgaaccaaatgctactgagtggtccgcaaggagttcaatgtttaaaagagacgctagaactctacaacctgcttggcgatccagccatatcgcggttgattgcacaattacagcagattgcgattgcgccagtaagtgcacgcttgaatcccgccgatccctattctctggcgcgtgggctggaggtgacattaacatttcaggcacaagccggggaatttgttgatttttacctgttttgcagcttgttagaacgttttatcgcaatgtatacaccgattaacagcttcacgcagaccgtaacacagttagagacgattaataatagtacccgccgttggccacgtcgcagtgggaggctgacatggctatagaaaataaaatgcgtttagttggcggccgtttttatcaaaatgtacgtcgtctgcttaaacgttgtcgccagcgtgaagaaacggcaatcatccctgatgatgtggtgcaattcagttcggtactgacattagatgcgccggaaagggaagtcgagtcgctattaccaccgcaagagggggatgaacagtatcgcatggcggtacatcactttggtctattaggcacccttggcgcattaccattgcgttataccgaatggttgattgacaggcgttaccgctatggtgacgaatcagctcaggcgtttattgatatttttactcatcgtctgcttagcctgcgttttcaggcatggcagaaataccggttatatattaataccgagttacaaaaccatgccgagttacaaaaccatgccgagctacaaaaccatgcggaatggcaaaattatcgggctttaccggcagtcattccagcagttgccggccaattgatggcggacaccacacagcgttctcatcccgcctgtgtcgggttgctggcaacaccggtccgctcaatggtgaatttgcagcagctattgcagcgggaattgggtatggcagtcagcatccagccctttaaagggcgctggcaatatgctgaacaggcacactgttgctgtttaggtcgcagtttgttaggcgataacccgatgttgggtcgcgcttattgggatattcaatcaggatttcatattcagttggggccgtttgccgctcggcaacgagccgcctttatgccgggaaatgaacaatatcgcaaactgacacaatgggtgtggcaatttgccggaccgctgctctccttttcactggaattgttggtacagcatagcgggcaaggcaatatattaaatggcagccgccaattggggtgggatggttgtttgggcgataccggcgaaagcaatattcagcgtctctatttggctgaatgtacaggtccctacgcaaattaaaccaaaaacgcaggtaataaaaagatgctattagggcaaaagaatcgttttttacaggttatcggtaacctgtcagatattgtggcactgaacaaaatagaaggtgaagagcacctgtcacgaccttattcattttctgctcagctctattccaacgcagactgggataagctggagtctcatatcggtaaacctttggcatttcgtcttggcgaagcgccgaatcatcgcattgtgcatggcatattgactgaattgcagcaacaaggttttagcgacggccagttttgttatcaagcacgtattgaaccctggctgaaaatgctgacattaacccataatttgcgcgtctatcagcgcatcagcgtgccggatatggtatgtgatatcttccgtaaacgtgggtttaacgacgttgaactggcgctaaaaagccgttatccgaagcttgaatattgtatgcaatacaaagaatcagattttgactttgtgacacgtcaactggaacacgcggggattttctatttctttcgccatgaagaaaggcgtcatgtactggtattggcagatcacccttcggcgtttattaacgcaccgttagcggtattgccatatcaatcgaagatgggtgatcagcaaggctatgggctacgcgcctggcatattcatcgcacaatgattccaggtacggcggaaatgaatggttataacgttaaaagtgctgcggcaatcagtgccagcgccaaagcgaacagcggctattctaccaatcccaagctttctatctatgacgaccgacgtcaggaggaacgtaaccaactggaaacacaggcaacgctgtgcatggaacaatgggaatcacagtcctattacgcacgcgccgttaacagttatcccagtttacaagtggggcatcagtttaccctgaaagggcacaccagcgccgatggccgttatgccgtcggccaccagcgattaaaagcggagaacaacctggaggaaggtgaattactgttttcgtctcaggtgaccttattcccggcgaataacgtattccgtccgcgtccttcggttacgcggccctacatttccggcgtattgtccgcgttggtggtagggccgacgtcagaagagatccatacggatgaacagggtcgcatcaaaatccagtttcactgggataaagagcataaaaaagatgatgacagctcctgctggatacgggtcagtcagttctggaatggcgcaaagtttggtgcacaatttgtgccacgtgtgggcaatgaagtcttggtgagttttattgatggcgacccggatagcccgctggtgaccggaacggtttataacggggtgaagatgccaccattcgcgctaccggggcagaagacccaaagcgggattacgacacgcagtagtgcaaaaggcacggtggagcaaggacatcagttctgtttcgaagataaaaaaggtgaagagtttattttgcttcactcacaaaaagatatgcgcctgaaagtgaaaaatgatttttcggcgcagatcgatcgcaacgtgttatgggaaatccaagaaaagcgcgatacccaaattaaaaagggcaatgacacattaattttgagcgagggcaacgccttaactgaggtgaaaaaaggtgacaaaaaacaaacgctggatcgtggcaattttaccaccaccgtcagtgcaggcagttatgagctggaagtatccagcggtaacgccaaaatcaatgtcggtcaacaatgcacaatgacggcaaatcagggcattgaactgaaagtcggtgccagcacattatcgattaccccggccgggatcaccatcaaagcgccatcggttaccgtagaaggatcaggaaaactggcgttgaagagcagtggcatggcggagctaactggcaccacggtaaaagtagaaggcagtgcaatggcacagctaaaaggcggcattgttcaggtggatgcgaccggcattgctatggtgaaaggcactttgaccaagattggttaatagcaggatcaacgaataataagagtttgccatcatggttaaattacgacactgccagctttcgccacaggcggaattggtactacaacaacacgcggcacatgaacagaatctatcggcgctcaataaagaaatattgtggcaagacgcagtgtactacaccatttttatgttgccttacactcaggctctggaactggcactgacatttatctcctgtgtttacgaacgcgatctgatgcaaggacaacggtcgttattgcaacaagtgcggcactggcgggttgatggcggtgatccgttgcgtcatgaactgttcgaacaggcgcaaacagtcgggtttgataacccgatctcatgtctggcgctttccgttttttggagtgaaggcagcatgacctccccggatttggaagcggtctatccacaaccgtggcagtcactggcggcattagccgatacgttgtgcctgatatttcacctttatggcgaacaaccagaacgacaaatgcagtacgttgagcaattttttcaactggcacatggtcaactaaggcaattgccgccatcgcaggatcagggacgcaaaaactatctacaccatgaagccacattatcaggagaacaatgatgccaatgccagccgcccgtgtgggtgatatgcatatttgtccaatggtctcgcctgcggtacctccggtgccacatgtaggtggaccgattatgccaccaggtgtaccaacggtgctgattggtggattgcccgcggcaacaatgggctcaatgctagtgtgcgtcgggccgccggataccgtagtcatgggtagcccaacagtattgatcggtggacggccagcggccagactcggcgatctgtgcgcacatggcggcacaattaccacaggctatccattggtgattattgcttgaaatggaagttactgtgaacttagcccaaacagatatcgcgcgttttttacaaccgattgctgctgacaaaccagcagggtgcgatatcgaatacgaacctatttttgaacagataaacgccgcgcgtgaaaccgacgacgattttctccaagacgacacatggggttatgaaacccgtcaggctgattggatgaaggtttcagcgttgtgtcaggaagtactggaaaaacagagtaaagatttgcagatagcctgctggttaacccaagcgcaaggggaactgtatggtctggcagggattagtggcggtatcacattacttgcccatctactggaaactttttggccggtgctctacccgccgctggatgatacagaggcaaacagtgcggatgcccgtcttggtcggttaagctggttggataatcaattggtgaaacaattggacaatctgacactgaccgatgatggcaaattgagcttaagcgtctggcaacgcgtgcaatattttgaacaacgcgctgccgttaatagcgaattacgcagtgccttgatcagtgatggttatttcggtatggctgagtgcgacggcagtattcgcactacacccgccgaacaatttaaccaattactgacgcgggctgaacaagttaataaggcattagcagaactgcaaaaaatcatggtggaactattgcctgatgccggtaacagcatgagtgccagtacgcagcgattgcaagagctggtggccttaatcgaacgatttcgtgacatggtggcaccgggatcaagccaggaatacggcaatagcaatgaagcaatagcggcagggggagatgcgccaaacggcatgaatacgacttttttaacagaagatcgggcgcaccatgaaatgcgcgctatcgccataggacaaatgatcaatatcgccaattactttcgtcaaaatgaacctaccagtccggtgccctatttaattgaacgtgcagcacgttgggcaaatatgggcatggccgaatggctggaagaaatgatgtcagaaaatacctccgcgctacaagaaattatgcgcgtgatgaaaggaccagaaataaatagagagcaaaatgaataacataaatttttatagcatcattaaacgccgttttttaatattgacagtaattcttttaataagtggttgcagtcattctatctccaacgatgaaaaacgtttgcaggcaatcgaacaagccaaaccggtttatgccagcaatgccattcgtttaaaaataaccgcggttccgcaactgaatgtttttaataatataccaaacagttgcacaatattaattgttcaagcggagaaacgtgaacaattagataaattactggctaatccggcgttattacgcaatttattttccggcaccggtgcaacagaacacatattacagttggataattacgtgatgatgccggggcaatcagtatctttacacatcgatagagcggaacaggcgcgttatatcgcattaattgccggttactacccggcaccagagagtactcatacgcgagtattatcactgccgctgcgccttgagcaacacggttggtggaatagcgcctggagtgctgaatttgttcccatgcgtattaatctgacgctaggacgttacgccattacccgcagtgatttctcagcaggtaacactggcgatgaggtagttttccccgaacaaatcgttttccccggacaaacggcggaatccggcagtgacgaaagtgtgttgaggaagtaacccatgtttgaacataaaccgatgtattggtattcaggattatatttacagccgcaacactttcaggcccatgaattgcaacatgaatactggcaaggacgttatcagttactgacacaaccttatgcttttggtgtggtgaaactcgcattcaatctggccgcgctaagtgatgaagtactgagtgtccatcacgccgcgtttatttttcccgatggtggttacgtggattgtgatgtcaacggcgtactcagtgcccgatcattgcgggattgctggccggtacgtgacaaaccgcagcgcatctatgttggcctgcgcatgttcagccacaatcagaataacgtcaccggtatcacggatgccaatggtgtcggtaatatcaccagccggtgggtaacatggccgcaagaacagcgtatgcgggatgcttttggcgaggggccggaagcggaagtgcaacaattgacctataacttacgttttttcttgcacgatgagattgctcaggcaacgggttatacactattaccggttggccaactgcactgcaccagtgacggtattgcgctggataaccgctatctaccgccatgtttgacgctctatgctgtgccacaactgggccagcgcattgatcaactgtgtcaggagttaaccgggcgtatccatcaattggaagagttgaaacgcccgcaaacactggaaggggaaatttatactcaggaaaaaagcacattattgctgacactacggactctggcgcgttatgtcgtacagttgcaccattttcaggaagcgagagatgttcaccccttacagatttttggattattgcgccaactgatcagcgagctttcctgttttaccgaccgttgctcctttttaggccagtggaacgggcaggaagaggtactggagaaatatcagcatctggatctggcgctaactcttgatagttgtgaacggacaattgccgatttgcttaatgcgctggtgctggaacccaataccgtgatctctctgcaacaggaaagccgtggttattatcatgcaaccttcaatacaacggggagcaatgaacagcaacggctctatttggtgctgcgttctgacagctttactcatcgcgagcgtgaaattcctgatgatcgcttgattaaactggcggcggcagaacagatcgacaacattattaaccgtgctttgcccggtgtacgtctgtactaccaggaaattgcgccacatggtttacctaaccgagcaaacacctgctatttccggctagaaaatcgcggtgcattatggcagcaggtagaagagagcaaacgtgtggcagtgcactgggcagatgcgccagacgatttacaaacagaaatcgttatagtgagagcgtcatgatgcagttgttggattgttatattcccgtattcacttgcgtattgcgcatgatccagcagcaggtgaatcaagcggaaacactgcggcaaaccgtattagctgagttgacacaagcgcagaatagggcgcgtttgcagggttatggggcacaagatatcgaagaggcaaatttcgccgtagtagtttgggcagacgaagccattttgtgtgcaggtcagaaagcgttgagtatttggcgccaatcatcattgcaggctgagctttatgatgccgaactgggcggaaatacgttttttgatcgccttgcggcattagtaccggataattatccggttcgattggtctatgttttctgtctgcttgctggattttatggccgttatggcaaacatgataatttggaattacacaatattatccagcaagagttaaataatcttcctgatactttgcgtggttatctctctttagaaaatcaccgattaatgaacagctacgataataagccgaaaaataaataccccaatcataaatggcgtagaaaattaatattattcatgtcatctattacattaatttatatttttattaccgtctatttattaagtattggtcggtaaactcggaaatcaaacatgaaaaaattattttatgccattggctggcttagcgtgatggttatccttttattactcagtttaactattgcggtggcattttcatggccgacaataggtggtttattactatttatttgcctattactgttgttattattgctgcgtgtggcaatggcattcatgccagaaataatgaataaactgcgctggttaaataaattctggcggaaaggaaataaccgtctggaatatttactctatcagcactggagacaaggaggatatttacaaagttggcgtcgattccgttcactgttacaccgtaacgaacccgttccaccgtggtttctggtggtaggggaacggggcaatggtaaacagaagttgttaacacgctgcaatgtggtgcccatgacggggaaaaatctgccagcgctgacagaaaacacctttacctgtcgctggtggttcttccgccgggcaatgtacatggttgtttccggccgttataccgaaggtcaatccctgtaccggcaagcctggttgcgtctaatcagttggatcgcacaagtacgtaaacccgctggcgtactcgtttgcttatcggtggaacagttgctaaacagcgacaatagagcgctctatatcgccgcacgtcaggtacgtgctcagttggaaccattacagatacgtctggaacgccgcttacccatctggctgatccttacccacagcgaaacattgccggggtttgaccattggtgcacccaactgtcagtagaacaacatgctgaattgctaggcgattttatcgagcatcatacggtgggtaatgtcaccgacgtgctggataagagcatgaacaccattgttaacacgttgaaaatgatgcgccttaagttgctcaatcagcaacggcagcaacccaatgcagaaatcttagcgttaccagaaacggtagctcaactgcaacctgcactgggttgttacttgaatgcactgttcgaccaagaccattatctggagcatggtctgttgcgtggcctgttttttaccgccgagcatcaaactgctggcgttttcagccaacgtttgttgggagaatacctgccagatcaagttcaacatagccaagatcaacgtagccataacgtattgctgactggctggcggacattgaccaaacgcgtatgcgttagcctactcagtttgatgctggtgtacggtgtcggcaatgcattgatgacgacctggcgtggcgttacgcaacttgaaaatatccatgaggcagacccgcttgagcggagttacttgcgctaccaaaaagttgaatactggttgcaggaaaccttgccatctctgtttttctatccggtcacccatacgatggaacaacggatggcacagcaataccagcaacaagcacctgttggtgcattcaacccggagtcggtagcggcacacttactagcacgtttccataacgcggaaacaccgcaaaaacgactgttggttttacattgggcacgctttattaacatagaacaggcaatgacacatggcgctacgctagaaactttacagcgtatgcctgcttattcagcttcactattaagtggtgaaaacgatcctttatccgcggaacaacgcgtcgcacttcgtctggcgcaatatcgccaaggcaatgcacagcaagcatttgatcagtggcgaaatgtattgcaaacactactagaagatagcaataactggcagtggctattagccgacgaacaaccgactggcacgcattcgctgacactggctgatttctggccgctcgccagcgatgatgttgccacaattaacacacgtattcgtggtatctatacccaagcaggtgagcaagatattcaggcaaccttaggagaactggcacaagcccttaacagaccggcattctttactcctttacagcgctcgttttatcaacagtatcaaaatcagcgccaatcagagtggttagcattcgctcaggctatgcctcaaggagagatgttagttcgaggcaagaaaaactggcaagcgctgatattagcagcgggccaatatgacagcccctatatcacctttctgacccagctagaacgtgatttatcctcgatagagcaggcggatcggcagccttggttacagacacagcagcgtttatggcaactgcatggttatgtgcaaaaaagtggcatgatgcaacgagtctcgctagggaatttctctgtgcgccagcgcatcatgtcatggcttggaatttcaccgcagatctcggtacggctggatgataccgcgctgacacgctatcgcgcctaccgacaggcggtgcagttaaatagccaacgcgagttgctcagtgatatggaaaccgaggtgttggttaaaaatgcgctaaataacgagaaaggagagttggatgatagcggtttacgcgcattgtttaaccgtttcaccctgtggcaccatgagactgaaagcaaacagagtgcaggagtaaatgaaaccttatggcggctctatcagggtgatgcgcatctggtactgcgttacgccttcttaagtgctgccagccgcttgcaaactcagtgggaaagcaaagtgatttggccgatggaaaaattgagcagacaggaactgtttgatggccgggaattgaacgcgcgtttgtatgaatacagcaatgcatttgtacgggataccgcagggtatgcgctggatatccgtcctgaagggattaaacgtcaggaaatagaggatgtagtctttccgtttagcgacgatttcattttctatatcaataacctcattcaaccgaatgacctactttcagcgacatcggatattcgccgtcgtctgcaagagaaactcgccttattggaaagcgaacagcaactgacgacagcacagcaggaaccggagcaagaacagaagccatcggcggaagtaaccattgtcagtcagccggcgaccgctaaccggggggcaaaagtattgccagtaggcagttcagtgacgttgagttgtgatgatggcgtacagcagcttaagagtatgaatttcaatgacagcatgacgctgcactggagcccaggaacatgcggtaaagtacaaattgatatctattttcctcgctttaccctaagcaaaagttacattggctccgatggtttgctgcaatttatgcacgctttctcccgcggtgaactgacattagcagctcaagcgttcccgcaacggcgggatgaattaagtgcgctgggtatcaataacatcactgtgcgctatcaagtcagcgaaagcacagcggtttcaacactctaccaacaatggcagcaacatcagcaacaacaaacggcgttattggaacaacgcaaccgactggatagccagttgttaaatttaagtgaacctacagtggcaaagggaactctctctactttgccatcacagatcaccacccattggaacgaattaaggaaacctaaaagtgagtaattatcttaaacagatcgtcagtaaattaacggtagaagcgcgtcagtgccttgacgaggcggttaatctggcagtacggcgcacccatcatgaagtggaaattgaacatttgctgttggctttgtttgaaaaacagcttccgacgatggagcaagtgtgtcaccacggcggtattgatagcatgacattgttgaatgcttgccaacggtcactggcattattacgcagcggtaatcatcgtccgccggtgctggctaccaacttaactgaatggatggaacagacctggatgtacgccagtactcactggggagcatcacagattaccgctcaagtactgattgtggccctgatcatgaatccgtcactgcaccattctcttacctcagagctacaacaagcgttacagggtaacaccgatgggatagaaccgtggttgcgtacacagacaaatacgacaccacaacacattacagcacctgttggggataatacccaatccgcactggcacaatacacgcatcacctgacacaagcagcgcgtgataacaaactcgatccggttttaggacgtgaacgagagattcgtcagttgattgacgtgctattacgtcgtcgccaaaacaacccgctgttaaccggtgaagccggtgtcggcaaaaccgcgctgattgaagggcttgctcagcggatcgtggatggccgtgtaccgaaagttttggcacaagccgaactatttacgctggatatggggctgttacaagcgggtgccagcgtaaaaggtgagtttgaaagccgcttgcaaaaattattggatgaggtgaagaagtatcccaccccggtgattctgtttatcgatgaagcgcatacgctgattggcgcaggtggtcaagccggacaaaatgatgcggctaatctgttgaaacccgcgctggcacgtggcgaattacgggcaattgcggcaaccacctggtctgaatataagaagtattttgaaaaagacgccgcgttagcacgtcgtttccagttgatcaaagtcgaagaaccttcgctagaactggcaatcgccatgttgcgggccataacacccgcaatggaaaagcatcataacgtcaaagtacttgcagaggcagtcacggaagcggttacgttagccaaccgttatatcactggacgtcagttaccggataaatcagttagcctgttagatagcgcctgtgcccgcgttgccgtttcacagaccgatgaaccggcaccgattgaagatctgcgagccatgttggcaaacattgctgccgaacaggaagccctgttacgtgaaggcggccatgaaactcagttacagaaattggcgcagcgtcaggctaaattgcaggcatcactggcagaaattttgccggaatatcacgctcaacgtcagttggtcaatgacatcctcgcctgtgacgaacacgacgaacggctaccagtgttacgtgcagaactgcatcagcgccaccatcagcacgcttatgtctttgactgtgttgatgccgcctgtgtagcagacattgttgctggttggacagggataccccttggtcgaatggtcgaaaatgagcgtgatgtgttgcgtcagttggaaacccgtctcggccaacgggttatggggcaagatcatgcgctcagccagatagcacgtcaaattcggattgctaaagtacaacttgccgatccaatcaaacctaccggagtatttatgctcgcagggccttccggtgtaggaaaaaccgagaccgccttagcgctggctcatgagttgtatggtggtgaacatcatctgatcacaattaacatgtcggaatatcaggaagctcattcggtttccggcctgaaaggttctcctccaggctacgtcggttatggacaaggtggtgtattgaccgaagcagttcgacgtcaaccttacagcgtcgtgctacttgatgaagtggagaaagctcaccccgatgtgctggaactgttctttcaggtgttcgataaaggcatgatggaagatgccgaagggcaacagattaactttcgcaatacgctaattatcctgaccacaaatgcggcatcagatttggtaatgcgggccgccatgcacggcgtaaaagagcagggggaaaatcgcccggccaccctggaagatattcaggagattatccgaccagagctacaacgtatttttacgcccgcatttttaggtcgtttgcaggttattccttatcttccggtacagggcgaagttctgcatgccattgtgcaccataaactgaataaaattgtcacacgttatcgtcaatcaacccaatgtgaattgcactatagcgacacgctggtggattttatcgctaaaggatgccagatcgcggaaagcggtgctcgtgaaattgataatctgttaacccagtttgtcctgccgttgttatcagatcaattgctattaggtggcgtgccagtcaatcaggatgtctggatggatgttatagacggtcaaatacagctacgatcagaccaaaagaaactatcactatctaatattatcaactaagggtagcaaacacttatctctgctattattatcttacaatgtaacatcagtgttacgaaatgagatcccgatgaaaatgaaaaagatagtgatcttctggtttatctttacattggtcaatttcgcgctggcactgttaaacctacaggtacgggatgtgtggagtctgtcatcactagtgtggtttccggcaggcttgttacaaggcattttttgcgccagagcaccgcggtactggcctgtctggttaatcacaggtgccttgatttcgctgactgccagtcagtggtatggaaggccagtcaacgtatcgctgaccttttccagcatcaatatgatgatgctggtagcaacagcgctgatctggcagtttttttacggtgtcatgtgggcaccgaagcggacgagggacatcattaacctgaccgtactctgttcgttaagtggcatcattgagcgatttatcgcaaaatggatactttatctatttggttatcctaccgacatatcggtttcattgccgattgttgtaggctcagtgttgagttatctaccacttacgttgtttgttatctactacatcacccacgagaaaaatgaggttgggaactggaaaacctacggtttatgtctggtggccctatttgccatgacagcattgttcatcagtccaccaccggaagccgggaaaatacactggcaaggtatcgcactgctgttttctttcagtttgccgatgctgctagcattcagcggtaatctgctggcattaagcagctttttatccctgtgtacggtggggatcgtcagtgccaccatttttggtcttggcccattctcatcgccgttaacccatctccaacaaaatgtgcagatagcggcttggtacagtacagcgttaacgttacctgcgttgttatgctgtagctgtttatccaacataatcaatgcattacatcggcgtaaagcgcgttttctgttaatgagagcgatgctggatcaagaacaggttaattgctttcggttaagcgccaaaggacatttgtactggcatcataatagtgctgcctggatgcggttcgggaaagcacctgcctcctggtcgcaattgatggcttgggtacatcaggaagatcggcacaaaatcgaacagcttaaaaattctgtctcgcaaatcccgcagacactaaaagttcggattgccgatggcaaaggcgaatttaacctgatcattatcgctttaattgtccatgtgggagaaaatgccggttttattgaaggaacgatacgtgaaataaagagtaaataaaaaatagtcaataatctggagaaataacccatgcccagacaagtcattattgccgacgatcatccggtatttttattaggactacgtacgatactggcaacattgccggagaattaccagattgtgggggaagcccatgatgtcacttcacttttctctctgctggaggaaaaagaagcggatatgctgattacggatttcattatgccgggtaataaccagatcgacggtctgaggatgattagccgaatacgggaacagtatccgaatttgccgattgtggtgattacgatgattaacgaccgaaaaataatagcttcattgattgactacaaagtaaaagcgattttgaacaaaaacagcttatcccatgagctggtaaaagggttgtacagtacaaccggacgttatgaaccctatttaagtgaacaatttctcgaatcaccggacgaagaagttgtaaaaacgctaaccagtaaagagttggaagtgattaaactgttgggacaagggttgagtgtgaatgatattgctgcgcgtttataccggactaagcagacgatcagcgcccaaaaaatcagcgcaatgaaaaaactcgggttagatagcgaagccgcgctttataattatttgcatcagattgggctggggctgtaagccatgaagtgccggtgcaaagcatggcgatggtttaccccgttggtattactgttaccgctatctggctggagtctcaacctcttcgaataccgcaatgcgcaagaattgccggcaaatggattaccggtggagttttattcaaatatcacgcaagaatcgcaggaatttttgccgttgcccattaaagagcaagcggttcttccctcacgcttcccgacattaaaagtcggcattctctgctgtatcggtgcgccactggtgatccatcgttgggacggcaagttggaaggaatttatgctgattatctgcgcttgattgaaactgtgctgaaaaggccggtggaagtacggctatttggcaactgggaatcagcttataaagcgttgcaacgtggcgatatccagttgttatcgaattccgcctcctcacaatcaggaaatgaagccaatgacacttacccgattctggtacaaccacttgccctgatgatgcgcaaagaacaagtcaatatgccatttgccaacatgaatattatggcggcacccagcagtgatccgaatgtcattaagcaattacgtaaacattaccgcactattttaatagccaaaaatcagcaagaggggatacaggccgtcgtggatggcgaaatggatgcctatctggacggacaaagccagattgcctatttactggcttttcgtccgtttaccggattgacttaccgccgggatatttcattcggggaacgatatgattttcttggtcacagcggtgatggcatagttgaagcggtaaatctgatcctgacatccattcctcatgccattagaaataaagtttatgaacgttggatttctggactggcgttgggtaacaacaacgacgccgctattttttcagctcaggaaaaagcttggattaaaaaaaatcctgtcatcaatgtggcactgaatcgcaatacaccgccttattcctttctggataaaaacggtcaaatcaccgggctggatgtggacattttacgcttgctgggagaaaaaagtggcatcatctttaattttatcccaacagatggtgcagtaggcattaaaaagcggttagaagatggcgaagcgcaaatgacctcgatgctcaacacgcccgaacgtaaccgttggctctctttcagtcatccctacggtaccgtggaatgggtgatgatcacgcgcaatgagcgtaatgcgccttatgagtttgaacaacttaaacaccatcgggtggcaattcagcgcggcaacgcacttttatcactcttaaaacagtatccagagatttttatcatcgaagttgacagcgtgacacaaggtattgatatggtactggccggagcggcagatgccacttttgacagcctgatcagtgctgattacctacaagcaagccgctacggtgccaatatttctattcaattctttaaaggctcattgcaaccggaacaatacgccgtcataccggcctatcctcaactggtagacatattaaataaaagcattgatgcactgccaccaaatgaactgcgggtattacggttgaagtggttatccatggcgaatgtcacgccttatgatgacaataaaatctctccttgggtgaagctgtggggaggggcattatttgtaattgcattaagctcggctttttggggcagttatcttgcacaccagatcaaacgacgtaaaatcgcggaaagcaacttacagaatttactggcgtactgggaaacactctttaataacatgcctacgccaatgtttgtctgcgatcccaccatgtgcatcacggcggctaacctctatttccggcatgaaatgggctctgttggatctgaggtgattggccgcagtcttttttccctatgctttttaaaaccggtcgatgagcaagagatcagtctaatttttctacgctgtttggaaggtgctcctgtacatttttctgatcgcaacattgttattcaaggacaggataaagatgtctatttgtggctcgaaagttatagcaataccgaaggcgttgttcaggggatcattggcggctggtttgatgtgaccgaacgtaaattgttggctcaggaactacgccaggaacgtgataaggcggaactcgccagcctggagaaatcagattttctggcccacatgagccatgagatccgtacaccgctccaagccattatcggtattcttgatctggaggtaaaaaagcaaactcagccatccacgccattacatatcgcctggcaggctgccatatccttgcaaggaatcatcggtgatgtactggatttctccaagatagaatcagggcgaatggtgctaaatctcaagccggaatcattgcaggtgattctggaaaattgcgtggcaacttttagccatcgggcaaaggaaaaagagttatttttcacctatcagtttgatttgccgtctgaatattatcatctactggacgcaacacgcgtaacccagatcatcaataacctgttgggcaatgcgattaaatttaccgaacagggtggtgtacagatcagcgccagctatcagcttattccagagagtcagcaagatgaaatcacgctggtggttgctgatactggttgcggcattccagaaaccatgtatgaagcggttttactgccctatgtacaggtgacacaacataatggcggtaaaaccggtacggggttgggattacctatttctgtacagctagttgaattaatgggcggcaatctgaaaatcacgggtgcgcccagtggtggtgcgcaggttaccgtgatgttaccgctgacgcgcacgattattgaaaaagaggcgataagcgaaaaaaccgaaaacattgagacggagcttcatgaatctttgaatatcttagtggttgatgatttacctgccaatttacaggtgttgtcattacagttagccccatcgggccatcgtatcgcgctaactgaaagcggtgaacaagccatgaagctggtggaggagggctatttcgatatcgtgctgacagattgccagatgccgatgatgaatggttaccaactggctcagttactgagaacacatgaacgattacggcaattaccgccatttattatcctgggctgtaccgcgaacgcgttctctaccgaacaggctcgttgtttggaagcgggaatgaatggtgtattaatcaaaccactggtgcaaagcaaattgctggcagaaattacccgttattaccgacaaatcaatgaggaagcaacattaacattcgatgagattcaagcattggctcagcaaaatgtggctgtagagtgccagttacttagcgcaatacagcaagggatgtcggaagatattgccgaattacaacaacaagaaaatcaacaatgccatgaaaaagtcgtgcatcacgcccatcgtatgaaaggcgcttttgcgctgatgcaatatcagcaaggaatacgtgtctgcttgcggattgaaaaaagtgagcagtgtgatgtgaaaataatagccgttttattaactcgtgcggaatatttccaacagcaaattaagcagaaattgggggaattgcatagttagaaatcaaatgaaacgacacagaaaaaccttagcttgaaaatataaatgcaatttttgtcatcgtaaaaattggaaaaaacaccattttgacgtacattgctctcacattatctaacgggtatacatctaaggaaggtattctctatgaatacagccacagttagcaactttatcctgactagtgcattaacacatgctgaaaaaaccattcatgaatacgaagttatgagtttgaataaccgagactcagaagttttcttcaatgcattggttaaatcggttcgcttcaataaaaagctggcagatgccttcgaagaacataatcaacgtgtgatcaataaataaccgataattatttaaatctattattaggacaataatcattgaggattttttatgcgtggcggattcgactaataagtgcaatttttcagaagggcggtcagttgctatagtaggcatctttctcgccaaaggaaaatgcactatggcctatacacaactgaccgaaacagaaagataccagatttccagtttaagagaagcgggtttttcacagctttttattgcgaagtcacttaagcgaagcccatcgaccatcagcagagaattgaagagaaatcaagaagtccagacatactgccctgaacaggctcatttgaaggtattggcgcgtcgtcattttgctaaaaaggccgtgaaaataacgccggaagtaaaaagatggataaaacggttaatttggaaagatttaagccctgaacaggtggctgattatttgaagcaacataaagggatatctttgcatcatgagacgatttatagactgatttatcaagataaaagagaggggggtgatttatggcaacatctgcgaatagccagaaaaccctatcgcaaacgctatggtcgctatgaaagaagaggtaaaattaaaaatcgggtcagtattgatgaacgcccggaaattgttgataaaaaagaacgtattggggactgggaaggagatacgataatagggaaagataaaaaaagtgtcttattaacattggttgaccgcaagacgctgtatacaattatcgttaaacttgatagcaagcaggcatcagaagtcgcgaaagcagcagtgaaagtattatacccgttaaaacaaaaggttaagaccatcacgttcgataacggtttggagttcgcagatcatgaaatcatcggtgaagaattagaaacccaaatttactttgctcacccttattcgccttgggaaagagggatcaatgagaatatcaatgggttaatcagacaatactttccaaagggaaccaattttaatgaaatctctgatcaggaaataaattttgtggtaaaccgattaaataatcgtcctcgaaaaacacggggtgggaaaacaccgaatgaattatttaaaggaatacgaacatgtttacttccagattaacgatgttgcacttattatgtgaatccaagcgtgctttatattttttccctattttcttatttttatcttcttgttcaataaatctcccaccttatgaacgggaagcccgacattatgtttatcgctctaatgatgattttgaccctaattttgaaacacatgtaaataattctattaagcttatgacgccattctttgaacaattttatcgagaaggagttaaggatagaatgaataacatcagttcacatgaatttgagaaaaaaattaattattttaagagtgataatttaattcaagaaatcggcatgtccgaaatattcatttcacccaaaatacacacaaaagaaatcaacaatagtcagatttcaaataagaagaaaaaagcattaattaacggaatcatcaattcttacgaggccggttactatggcaagtaagaaaattaactatgaacttataagcataatggaagcgggggagagggaattaacgatggacacaataaactattcagcatttagaactcacttcgccagccccttagataaagtgaacgacaatcacaagccaattctgattactcatcagaatggcaagccagcgatcgccctacgtttggaagattttcaagcctacgaagaaacagcctatttaatggctagcccgaaaaacgcggcacatttaaatcaggcaattgctgaagtggaagcagggagaatgattgaaaaagggctattgaaagaatgattttatcttggactgaaatggtaaaggcaaccctttgatggagaacctttaaaacataattgtcgggttattggtctagacgtattaatcgagagcatcgtctggtttacaaggtaacagatgatgcaatcattatcgtgcagcactattaaggactacctatcagaggacttcataaacgaagtcccctagtcgttattttaagaaatcgtgatggcgactatgcaacaagccaaataccatccattgttgcgttactttttcgactagtcaaaatccatcaatgagaaaatccaaagcatctttaatttgtttccggtgggatgtgacatcaataacttcattaccgatcatagatactctgatacttgccatttcatgagtcatgacgatgtagtcactctcctcaattgtcaatattggacataatcttataggaactttgcctttaaaattttctttcagaaacaggggtatcattaatcttgtattcaacatatcaataatgtcactctgtacgtcaagaagatatgggtaagcagaattgccaatattgcgataaacaacatactgcatctcagaacaccctgtacttgtcagacagtaaaccgtgttcgttagtgatacgattaagttcttccattcctgccttattctcacgtttccagcgttcagactcaacggctttcagttccgaaattagtgctttagtcagcactgctgataagttaagccctacctgtctcgcttgttgatacagttcaggtgcaacggtcacgctcactgttttctttaatctgatttgtgttgctggcatgttaacccctgtatgaaacacgttattttacacttgtaattatagcaagcttttttatataaggacggcagaaaagagtcaatacatctaatccaaaggacatacccgaataatatgaccatcgggatcttcaacgaggaaagtacgaccaaaaatttcagtgtggggttccttcacaatcttgatatcgggtttcttctgccattcttcaaataagcgatctacatcttctccagatggcaacataataccgatctcagagaaccgaggagtagaggcatctggcgttgttccgcctgaccaaatagcgaatagtgcttcaccgccagcggcaaatgccacataacgagggctcgaaaataccggcttagcattgaaaatcgtctcgtagaagaccgtcgaacattcaatatcagatacgtaaacaagttgaaggttaggcttgggggatactgtcatcatgtaattctcatctaagttagattcaataagagagtaaaagcaaatcaatatgtaacatttgttaccggattgcgcttgtatcatagtaatataatgttagcaggctgtatatacatacatatgtaaattgatgtgggaattctgggatatggagatgtctaagatcgaatcttgtggggaaaacatgagagttacctcttgcgctttgtataaggattcaacatccatatccaaaccggtaactctcaaccttccaaagtgctttgtcagatctgataagactagcgacagttaatcgtcaagggaatttttcatcctattttgagtatattcaatcaattcttcaatttctaagctaggggttgtaccacaatgaatatcacagaacaatatcgggttagatcctttcgacgaataaaaaccttggatatcttttaaatttgattccctagctgcacataaagctcgtaaaattctttttaacctttctttatcactttcgttattaataaagttttcaagattcgctctaccaccgtgggaaatctgaaagaaatgattaccactattattactggtatcaatgcgtttcatcttaataatagtagcgtcatcattacgatctataccattgctaccttgaaatgaaaatttagcattaaaaacgtctaagtatacgcttggcaagccataactacgatcacagtttttaaaaacacttttaatagaattgtttagattcattggcttatacgctatattatcaagcatatatacatatccgcctttcgcttcgcgagaatttcttgtttctgcttcggtaagattaataatttcaccatttcctaattgtatgtgagccatctcataatccccttttacttgtcaaaaaaatgtgtattttcacataaaagataagaaaaattcgtattcatatcacgattaaatattcattttatgacaaatcagaaaatatactgacttacaggattttattcactgatagtgtagtattttgagaatattgtttcaagaacgactttcgagaatactaaccccttgatgttgtgttgtgctaatttgactgttcccaacgtaggacctgttagccaataactaatttactgcctatctcaatagggctattttatttgcccttctttgccataaagagcgaacctgggcagtgctcaaaatcctcacgtactacgtgtacgctccggtttttccgcgctgtccgtgttcaaactgcctgcaacaattacgcctattgagataggctcttaatcataaatatagcgattaataagattttcgagtaattcctgttgcccacttcgatgtttaggttcctgaactaatgtttctgcatagtgagccacttcatcaagtgtcatttttccttcaagaatatctctacctaattcactattccaaccagaataacgctgagcgacatattcatctaatttaccgtctactaatattttcaccgcgctctttaatgataaagccatagtatcgatggcaccgatatgcccataaaacagatcatcaatatcaatactttgacggcgaacttttgcatcgaaatttaaaccacccgtggtaaagccaccagcttttaagatttcatacattacaagagaattctcttcgacactatttggaaattgatcggtatcccaacccaattgagcatccccgcgattcgcatcaatagagcccaatattcccaatgcaatcgcggtggcaacttcatgttgaaatgagtgtccagctaatgtggcatggttagcttcaatattcaccttaatttcattttctaaaccaaactgctttaggaaaccataaacagtcgctacatcataatcatattggtgtttagtcggttcctgaggtttaggttcaattagcaatgttccctgaaaaccaattttgtatttataatccacaaccatttgcataaaacggccgatttgttctctttcttgacgtaaatctgtattgagcaaactttcatagccttcacgtccgccccacagtacataattttcaccacctagctttttagtcatttgcataacttgacatacttgtgctgatgcataagcgaaaatattgagatctggattcgttgacgcaccggcagcataacgaggatgtgtaaaacagtttgccgttccccataataatttaacgccagtttctgcttgtttatctgcaagaatatcggacatgacacccaaattataaatatattcttttaaggaacaaccttcgggggcaacatcaatatcgtggaaacaataaaaaggaatattgagtttgtagaaaaattcaaaagcaacatcagctttaagcttcgccagttctaaagcatcaccccctttttgccaaaaacgctcaaatgccccagaaccaaacatatcagtaccatcccaacaaaaattgtgccaatagcagacggcaaaacgcagatgatctttcatctttttgcctagaataatctcttcggggttgtagtgacggaaagctaatggattattactttgcctaccttcgtaactaattctatttactctctcaaaataccggtgcatatcagcctctctctaatatatacccgtcatctttcaagttgcttctttgttggctgcactctctcaccctggtcacatagtttgctatgctcccggggattcgctcccttgccgccgcgatccatcttgaaatccatagggtatagacatatgtgtatataaaattttgttcatcaatgtcgctattttcaattgcgttattttatttcttcattaagattcttgttaattgtgtgatttatctcataaattggcattaatttaaccctgaaaatagaaaaataattatgattaaataagggcatcaataatgaacagacgataccatataacactattacttaacgctaataaagcttatgatcgtcaggtgatagaaggaataggtgaatatttacaggaatttcaatgtaattgggatatcttcattgaagaagatttcactactaaattaaatagcctgaaaaccttacagagtgatggaattattgctgattttgatgatatagaaattcaacgttttttcagcccgttagagattcctgttatcggtgtcggtggctcttatcaccaagaaagtcattatcccgccgcgcattatattgcaacaaataactttgctttaatagaaagtgcgtttaatcacttaaaagataaaggtattaaacgctttgcattttatggtttacctcagacaagtggtaaacgatgggcaatagaacgtgaatacgctttccgacaattagtcgaaaaagaaaaatatcaaggtgtgatatatcaaggaatggagacgacaccggaagattggttttatgcgcaaaatagattaaaagattggctccaaactttacccccaaataccggcattatcgcggtaacagacgcccgagctcgacatattttagccgcatgtgaatatctaaatattcctattcctgaaaaaatctgtgttataggtatagataatgaagaaatagcccgttttctttcacgtacggcactctcttccgttgtgcaggggacacagaaaatgggctaccaggcagcaaaattgcttcataaacttcttaaaggctacgttcctaaaaaataccaccgccaattaattcccccgttaaaggttatagcaagacaatcgacagattttcgggcattaaatgatcccgcggttattcaagcaatgcattatattcgtcatcacgcgtgtaaagggataagagttgaacaagttattgatgctattggtatgtcacgttctaatcttgaaaaccgttttaaaagtgaatttggacaaacaattcatactattattcataatgagaaattagataaggtaaaaaatcttttaatccatacctctatttcaatcagtgaaattgttaccgtttgcggctattcttctttacattatttttactccatgttcaaacgaaattataatatgacccctaaagagtatcgagataaatataaaattaccaaaaagagttaaataagccaccctcaaacaaatagggtagcttttaatttaattaaatatcttcgccgttcgttgctataactttcttataccaagaaaaactctttttcttataacgtacaaaatccccatttccattatcatcaacattgacataaataaacccgtatcgtttacgatattcaccggtcgaaaaagagacacaatcgatacatccccatgaagtataaccgaggatatcaacaccatcgaataaaatagattttttaatttcagataagtgtgatgctaaatattcaatacgataatcatcattgataacaccattttgaggtaatttatcaacggaacctagcccattttcaacgataaaaatgggtttttgataacgttcatataactcagataaactgtatcgaatacctataggatcaatttgccattcccattcagaggattttaaataaggattgtctcttcctttttcgaagaaggagagggattggctatttttttctaacatttctgtggatgaagagacgatattactcatataatagcttatcgctaaataatcagcgcaaccttcctttaaccaatttaaatcatcatcttcaatatgaagttctatcttttttctttcccattctttaataagataagatggataatatccacgaagttgaacatcgctaaaaagatatttctgacgcatggcttgttgtgcatataaaacatcttccggcttacagctcgctggatataatggcgacatatggatcatgccgccaattttaaaattaggatttatttcatggcctaatttgacaacctttgcgctagcaacaaattgatgatgaatagtctgatacataacctgttctggattgtcataatcctgataaatcacacctgaattacaataaccaaatagtggatattgccaatttatttggttattaatttcattaaatgtaatccagtatttgactttatttttatatctttccataaccgtcaaactaaaattcatgaaaaaatttattaattttcggttatgccaaccgccatattccttaaccaaatgataaggcatttcaaagtgagataaggtaataatgggttcaatattatatttcaataattcatcaataagatcatcgtaaaattttaagccagcttcgttaggttgtaattcatcaccatgaggaaaaattcttgaccaagcaattgatgtcctaaaacatttgaatcccatttctgcaaatagtgcaatgtcatctttataatgggaataaaatttcacaccttgatgattaggatagattttattttcctcaataccatgagttatgacacgattaacgccgtgctctccttttgtcataacatcagcaatgctcattcctttaccatcttgattccaataaccttcaacttgattagcggcaaccgcgccgccccataagaaaccggtggggaatttattcttcataagtaactcctgattattatcttcatcaaaaatctttcttagttaaagataatagaattaatcgagttaggttccaaataaatagaccaaatatcattattataactaatatttattttttgcttttctttataagagttatttatattcaccacaagggaacctgttttattctcgaaagcaacggcatttcctgacatactaccttctaattcaatatgttgtgcatcaggcaaaattaaaccagaaaaatgacgcatgacataatactctggattatatatcacttcatttattccttttggaatacttatcatgctattctgtttccagccccaactactttctccacctgaatgcagcaccatattccagtacaaataaccattagcaccattggttaaataatgcctgaaaagggtaaagacataatgagcatattcccaactattatgaccatcaccacactcattttcagtttgataatatcttaattctggatagctttgtaccgttctttgaatagcattttttccttgccattgataaccaacgccttttatatatttataggcgtctatgtcacgcaatacacaatttgcataatcatcataatcctgtccaatttctttagagaactcaggggcattaatagtacctagccaaatctcagtttttacattattttgttcaaatttcggaccgagatatttttttataaactctcttaactgttcaccgctccacacacaagaaggaaatttttgatccgcagcaacttcattctggatatgaatttgatcaattgaaataccttctttctgatactcttcgataaattttgcaaaatataaagcatatgcattctggctttgaacatcgctttttaatctgccaaaattatagacttggtgagtcttaagccataccggcggactccacggtgaagcagatatttttaaatttggttgtctttttaacgcttcctttatatagggaatcagtaaatttctatctctttgaatcgaaaagtgtgccatattataatcatcttcaatatcatttaaactataccaagaaatggcataatcgctggcaccaataggtattctggctaatgttaatttgcattcaccatctggcgaaaataacttatctaacacagtttttttattttctttatccagatctaataaagctttcatcccaagttcattaaaacaaccgccaaagccatctaattttcgacctcgattattagtgacaattaaattggctttctcatctgtttttatgatcgacaatccttctttccattgttctttattatttgtatagataactttaatcatgatttattatttcccataaaagtattaatttattgaaattaattaaacataattatcttaatattagtattatgttatttcacaaatggtttaacttaattttttttttgagtttcatcacatatcttttttctaagttattcttttattatatactaaccacttttgccaccataaaaaggaaattttatgtctctcgtaccatttaaacaggttgatgtattcactcaccgaccctttaagggaaatcccgttgccgttgttatggatgctcaagaactttcatcaatacagatgcagggcattgccaactggaccaacctttctgaaaccacttttatccttccggcagaaaatccattagcagattatcgtgtccgaattttcacacccggtagcgaacttccttttgccggtcatcctacgatcggtaccgcacatgctcttcttgaagccggcttaattcaggcaagagaagggcgtattgtgcaggaatgtggggcgggactgattacattaaacgttaccgaaagggatgaaggtcagaaattaatcactttcgaactaccagaaccaaccatcacaccgcttagttccgagcagatagatcgcctcgaaagcattctagattgcccgttagatcgcgcgctaacaccggcacttatcgatgtgggagctcgttggattgtcgctcataccactggagcagaagctgtgctggcaacaaaacccgactatgccagattacttgaacacgacacgcaaatgaacataaccggagtttgtctgtacggtgcctatcatgaaggagcagaggctgatattgaagtacgctctttcgccccatcatgcggtgtcaacgaagacccagtttgcggtagtggcaacggcagtgttgctgcatttatgcgccaccacaaagtagcaatgattgacgataaaatcgttcattcatcacaaggcaaaaaacttggccgtcagggaagtgtatggcttagccattctgatggtaagatttttgtcggcggtagtgctgtgacttgtatcaatggcaccatcacaatctgaaaaaagttatcagccctaatatgtagttcagaaagggcgcttgttttgtcggaaaacagatgttttccgacaagcgatattgatttcaattctctctaaatatgctagaaaatcgcatagagtaataagattataccctatggatttcaagatgcatcgcggcggcaagggagcgaatccccgggagcatagataactatgtgaccggggtgagagagtgcagccaacaaagaagcaacttgaaagacgacgggtatatatatactttattagtacagaataataatgttaggaagtcagaccatgacgaaacaagctgtttttacgatgaaattagaacctgaactacgtgccgaatttatggctgaagccgaagctgctcaccgcccagcctcacaggtgctacgcgaactcatgcgcgagtttattcaacgccaacgtgaggaacgagaatacgataaattcctatgtcacaaggtagaagcagggcgagcctcaatgcgtgctggtttgggccaatctaatgatgaggtcgaagccgagtttgccgcacggcgtgccaatgtggtgaaccaagcgtgaaagttatctggacaccagaagcgaagcaagaccgcgctgacgtgtgggactacatcgcagccgataatccatacgcggcagccagaatggatgaacagtttagtgatgcagcatccaatcttgcacgacatcccatgcttggccggccggggaaaatgccaggcactcgtgagctgtttccaaacgagagttatcgcctggtatatgagatcaacggagaaatagtatggatattgacgcttatccatacagccagacagtggccacctatgcacaaaatgaagtagtagcgaaaaccattgacgataaacgcgaaactttacttatcaatgcctgtcactgataaaaggtagagtaaaagagctagaccgtagcgaatattaaaaaactaaacaaccacctactaatacaccctatggattattagataattcagaaaggccgcttattttgtcggaaaacagatgttttccgatagtaattgaatggtacggggaatgggtcattagtagatccctaattcctgagcctgattagctaatgccttcatagcctccatactctcagtattacgctgctttttatattccatcagatcagcaaaacgaatacgccgatgtcggcctgttttatggaaaggaagacaaccatcttccagaagtttaaccatatgaggccgcgatacattcaatatgtttgcggcttcttgagtggttagctcggcatgaacaggaacaatttgcactgcattacctgaagcgagttcactcaagatttgcactagcatagtaagcgcagatgtaggcacttcaatttgatgagatttatgatcatcactaataattgaaatctgctgagtttcaagttttgttgaaaggaacgctgaaagttcacgcagcccctttccagctatttcactttcgcgtttagccggaagatttatatcagagaaagtggaagtaatcatgttgcacctgttagtcattcattttgacttagcacattaaacgaaataaacgaaaatcgcaataaacgtaacacaattgttttaagcagaatctgatacgtttttcgcaataaccatttccaaggcaactcttctcgaagaaagaaccagatttagcatatcgttcgaaaaacaccaaacctgcaatcaataatgattttaaacccacattaaataattccatcctgacttcaagccaagattaaatgataatgaatccacgttatttgataatgaaaatgcccttttttgacggatatactgaataccgtaaaacatatttttgaattaatggtgatatcgaaaccaacactctataaatatatcgatgcagcaagactatgaaaactctacttatatgttatggaagattaaaaattataagtaacggattgaattaatcactattgaattaatttccattgaaatatttaaatgtgattgagtacagccaacaaagaggcaacttgaaagataacgggtatatctagttattaactaaacttaagggaatatatatgcataataaatttttttctttattgccagccacattatttttcttctcctcgttttccataggtgcaattcaggaaacgagaatgattaactttgaaaataaaatttcattaccaagaagtacagaagaacaactatataaacttgggaacgagctgcatagcgcatctgttgacaagttgtactctgcaagatattggggcaaatatggtactttttcaaaggttggtatggaggttcaaggaagtctagcttatggaatggctctggctagttcatcggatcttgacattgcatttgtttataaatacaacaatggcgaatcgatgaacagactcagcccgatagaactaaaggttaatgctgtcaatgtattcaaggaagtttttggtagtaggtataattatactattaaagctcccgtaataaatttaagtaacagtacagaagatgtcgatattgcatttttcaacgttctgaacaactcaacacctttatgctctatcgataaaaggtgttctgaattgaactatggaaaagatcctgccacatcagaatggtatcgttcagaacgtcttagcctatactccgaacttgataatgttttcagtaaaaaaacacctaaaagagagataattaatcgatcaggaaaaatattaaaagtatggcgggagaaaattttttccgatcaagatgtgaaaataccctcgattgccttagtgaccatgatttacgatttcagtaaggacaagggcactacatataattacaataaatccacagatactcttcgtgatgtaaccagctatggtattactaagtattttaagaatgataaatgtgaaggtgctccaaatgcaaagattgacttgcctgtatatcagcaagatagaaacctcttaagtagattaaattcatcacaacgtatgaatacctgtctgaaattagttgaatttaataaagcacttataaaggcaacatcggctcatgtaagcgaagctgattcggttaaaattcttgagccttttattggtcagttttaaataaggtgcccaaaaatagttatgcaggtatgagatcagtatggcaaataaaacctcatctccggctttgttgaataaatcagtccaggaaaacaattcttcctggactataccttatagatttcaagatgcatcgcgacggcaaaggagcgaatccccgggagcatagcaaactatgtgaccggggtgagtgagtgcagccaacaaagaggcaacttgaaagatgacgggtatatatattttgtcgggacgactacccatgcccgtatcctgatgattccagagtgttatcgggccaattcttatcaaattggcctgaaacagagatgatgcttttcaacaaaaacagaattttttgtaaaatgcttcaacggatggtgtcaccgcagtcatatgcatcgcaccatgtatcattccctcaatagtttcaatctgcacggacacaccggcatctcttaactgctgagcataagcttcgccttcacttcttagcggatcgtattcgcaaagcaaaatagttgcatctggcagtccttcaaaatgcgttaaatgagaaggcgagataagtggatttgttctactgttgtgctcattaatgtatgcctgccaaaagaatgccatcatctgttttgtcaatacataaccttcaccatatttatcgtatgaatccgtttccattgatgcatctaaagctggatagaatagcaattgatagcaaatagcaggcccttcttggtttcgcgacatcaaacaagcggcaacggcaagattaccacctgcgctatcaccaccgaccgcaatttgttgcctattgataccaaacttttccgcattatcagtgacatagcatagagccgcatagaaatccgttagtggtaccggaaaagggttttctggggcaagccgatagtctaccgagaaaataacgcaacccattgattccgccagcttacggcaagggcgatcccaagcatcaagacttcctaaacaccacccgccgccatgagcataaaccagcgcgggtttatcactcatcttttcttttccatagggtacatacatgcgaaccggaatagggaaaccatcctctgcgaggacagtaaagctgctattatatgtcgcatcgttccattcgccctgttgctggataagagcatgctcaagaacgattcgaagttgttccaggggggaatcttctcctattgcaatttcaggcgtagaagcaagccatttttcaacatttttatcaagtggcataataataactcctctgtaaaaagtgattgccagatagcaaaattgttcggggcattattcagtaacaaaatgtccacagttagtgataattgcgctgtctagattcgatgacacttttttcattgtgagataaggtgcatctcgtgtcgcgtactcagctccaatagttaaaaccagcatagataattgtatacgagcaagacgctgatagtaatgagaataaaaaaagaccatcggagaaaaagaccttttaaacggtcttttttgtttcttttctcaacaaagaaagctactataagactcattaacaagtcttttggagtgtttttatggccaacataattctgtcagatattagcgcaagcattagtgaacttaaaaagaaccctatggcgacccttagtgccggggctggataccctattgcaatcctaaatcgtaaccaacccgtgttttattgtattcctgcggagctctatgaacagatacttgatgctttggacgatcaagagcttattcgactggtaaatgagcgtagagggcaggcattggttgatgtagatttggataattatctatgatctatagagtgaaattcacggaagatgcactcaaggagtggaagagacttgataaatcagtccaacaacaatttgctaagaagctgaaaaagtgctgtgttgaacctcatattccatcagttaaacttcgaggcatgccgaattgttacaaaataaaattacgcgcttctggttttcgcttagtttatgaggtcatagataatgtgttgattatcgtcgtagtagcagttggtaagcgcgaacggagtgaagcgtatgagctagcaagtaagagactaagatagataagggaatgtcagatgctctgtcgttagtgatgatgcaaaattcaaatctggattttcaatgaaactgaatttgaattcaaaacaatgcatagaataaatccatacaacaatatagaaatgacataattaaaaccaagataagaggtttatttatgatcttaaaaaatatcaatttgttgaaagttgtacttattattacctttgcaacaaatcaatctcttgcagcaaataatattacatttctgagtaatccttcaccgcaacatgtcaaggatatcggtaattttgttgtgaaacaaactgaaaaaccatttttttccgatgttatattattcgcagcaaatattaacaatagtatatctaatagccctgtactgttttacaacgataaaataagctcgatactcaaagaaaatatttccctagtgcggaatttgcaaaaaaagggcatcagagttcaactatcctatctgggcaatcatcaaaatgcaggttggtcatgtaatatgagtcaagcaacggcaacgaaacttgccaatgaaatggtaaatgatgtcgttaaatacggattggatggaatcaatatcgatgatgaatattcaacatgctatggtaatcgtcaatccttctattgggtagcggatgcgattaaaagccatccaaaatttgccaacaaaatactcacaaaagccctgtggtcagattatctctacttcaaggaaccgacaaatatagcaaatttactggatgcaggttacgagatgacttacatcaacaccagtgccagtaagctggttccatacgttaacttcgggatgaagaaagaaaatttgttgttgggtatctcccccgaaaaaaattcgatatcctcagtgcagaatattacccgctcagtcattaataacggatatagtgggatgatggtatggtcacctaatacaatatttacaattgaccaagcatctcaatattacaccaaaatcatcaaagcagaagaggggataaataaagaagttatctatgtcccggataccagcaaagacaatgcaagtaattatgaataattacattgttaatactttagttggttataaaaataaataccgttgaatttttgattttattttgtgtagcttgaaaaacagttacacattacccagtttgatgaaaaataataaaagggaagagaaccagtaatacgtactggtattaaccatccgcaagaatcgtgaagtaaatattttgtgaagccgtatgaggttatcttatgaagagcgagtttaaagagggatattgtactctctgtagatcaagatgtggcactgtcaacgaagttcgtaacgatacactgataaaaatccaacagaacccaaaacacccgaccggcaacgccatgtgcatgaagggtaaagctgcaccagaactggctcatagtcctaaccggattcttcatcctctccgtaggacaaatcccaaaggtgatgccgatccaggctgggaaaaaatcacctgggatgaagcgttgacgtatgttgctgagaaactggctttctataaggctgagtctggtgcagaatcggttgctttctcagtcacctcaccaagtggcacacctcttagtgacagccttgaatggatagagcgcttcattcgaaatttcggcagccctaacgtctgctatagtacagaagtgtgtaactggcataaagacgaggcacataagtttacctttggatgcagtattcctgtagctgattacagaaatgccgagctgatcattttatgggggcacaatccaacaaatacatggcttgcgcaagcggaagctcttggcgcgggaagaaatgcaggtgccaaacttatcgttgtcgatcctagacatacggctcttgctaaagaatctgataattggctcaacatcaatcctgggacggatgccgcgttagccctcgggctaataaatatcatcataaaccgaagaggatatgatcaggcgtttgtagcacgctggacgaacgcctcattgttagtacgaaatgataatggtcttttcttgagagaaaaagatataaacatttcagctaagaaaaacagatatgttgtctggaataacataactcagtctccgctaccctatgatattcacgaaaatgtgccatgtgatgaaaatgatcattatgctttattgggcgaattttcgattaactctgcggaagatgtaaataaaaaaataccatgcaaatctgcattccagcgacttctaaatgagtgtcaaccatacacacctgaatatgtagaaaaaatcaccggcataaccaaagaaaaactcctatatgccgcagatttaatcatctcttccaaacgaattgcttatcattcttggacaggtgtagctcaacataccaatgcaacccagtctgaacgagcaattgccgtgctgtacgcactaaccgggtgttttgacactcagggaagtaacagggtgtacaataagcatcccgttaatcctgtaaatgctcgcagacttatgccaaaggagcagcaagaaaaagcacttggctttaaggaaagaccgttggggccacctctagatggttggataacatcacatgatctgtatcaagcaatcttgcacaaacggccttacccgattagagctatgatggcatttggtacgaatatgttgtcatctcatgctgacaccaaaattgggatagatgcgctaaaacagcttgaatttcatgttcattgtgatctctttgaaacgcctactgcacattatgctgacatcttactacccgtgaatacgccttgggagagagaagggctacgtgtaggatttgagatttcagctaaggcagaagaactcgttcagttaaggcaaaaaatgatttcgcctcggggagaaagccggtcagataacgaaattgtcttcgacttggcctgtcgcttaggcatgaatgatctattttttaatggaagcgttgaagcgggatggaattatattcttgagcctattggcttaaccgtagaggcgttaagagaaaagccagcagggatttcaatgccattaattcagcatgataggaaatacgcaggaatcgatcctgttaagaacacagttaaaggttttgataccgaaacaggagtggttgaaatctattctgaaaaattgtggcggcatggttatccgccactaccaatatatgatgaaccaaaagagaatttaaactctgagtcacatttcccttatcgactaacctcggtaaaaaatggtttctattgtcatagccaacagagaagtttaacccgtctgcgcaaaaaatcaccttatccgaagcttgagataaacagcagattggctgaaaagaaaggtattaacaatggagattgggtagaggtcatcacccgcaacggcgaggcacgttttaaagcatcgttagatgataatattgcttacgacacgataattgctgagtttggttggtggcaagcgtgtcccgactatgggaaggaaggttttcccgccataggaaaaaacagcagtaactataatgcgcttatttctgacgactcttgtgatcctatcagcggcgcttctccgctccgttcattccgttgtgatattaaactcgcagaagatatcaacccggagagaaggccgtggcagggccgtaaagcatttcgggttgtagatacaaaacccgaggctaagggtgtcaaaaccgttatttttgagtcacaagatggaacaatgctgcctgattatgaacctggccaacatatcacagtacaagtttccatacctggacaggatgcccctgtcatcagggcctattctttgacaggaacggcaacactggaaggtagaaagagttacagtatttccgtacgacatcagaaaagcataacttctgacggagaaacttttgaaggtgtcatgtcttcatatattaacaagacactggtagccggagccgaagtgaatctgacgcctccgggaggaaactttattattccgcttaatgctaagcaacctgttgttatgttggcaggaggaattggtattacgccattcataagttatcttgaatctcttcccgctaacggtgaaaagcctgaactcttattgttgtacgctaatcaaaacagcaatacacatactttttccaaaagactaaaagagattgagtcaaaaattaagcaattgaaggtaatcaactattacagcaatccgttgccagtggatattgagggtattaattaccagtatcatggatatattactgcggatgccgttcctgaaacactgattaaacagcaagctcgtttttatatgtgtggtccggctcctatgatgaaaacttttgaagaaggtttactcactctaggcgttccgccttttgatatctataaagaaatgttccgatcgctaacgccggtaaaaattaaagatgggaagagttttgctgttaaatttgaaaaatctggcgttcctcttgaatggtcccctgacaaaggaacactccttaattttggcgaaaaaagtggtattaagatggcaagtggatgccgggttggacagtgtgaaagttgtgctgtgaaattaaaaagtggcgaagtacaacacttaaatggcgtagaaccttcagagcaaggaatgtgccttacttgtcaatgtatacctatctcagatatttccattgatgcctaaaaaaatactaaggtaacttacagcggcgttcagggagaaatgtacgatgacgacatttctccctcgctcattgtcgaggtcactgatgccgtcaaaaggataggggactgaatggcaaaatcagcagccaataaatttaatttatgtttagcgaaaattaagtccataaaataacttgtatatatttaattgaatttattgaaaataaatttaagcttggttttagtgagtttttatcatatctaagatagtaaattcagcattcagcactatttaaatcacaggctcaagtatcaggcataatcttaaacgtaatcatatagttgataacccaatctcccatataaacaccaatctcatatcttttaataacaaaatatgtcagtttgtaataaaataaataatgacatgattaatttatattaattaagttaaattggatttttaaattccctgtactactcttttctatagcagcttttgatttatataaaccgtctctgtctttgcaatataattaattgctgctacagatctatattattatcacggcaaacataaataacctgattatgttatttatatgattactatacctattatgtaagccaatgagctaatcacataattttaatattttattcataggatttataggtgaaattatgtcaacagaatacaagatttatattgtcaaccagcaagataaaaagaaaaagttttggtgttttctcagtgaaccacaatcagaagtaagtgataaagtgtttgctaactcatcaacttatatgacattatctaagtatgaaagaggagatgaaaacgcttttattattcctcttgaatttaaattgaaggctagttcacacaataaggtggtaggtattagttcacaaatatctactcattcccttagaaatatagaattagggagcgtatggaaggtagaatttgactctagcgaagaacatataaacccatccttaagtaagttgagtgaggaaactgaacctaaccaagtcggaattaaaatcaatggtttcgatttgacagaacaagaaatcaatcagtggtatagctgtcttacatttggtattaaatcaggagcgggttttattggctactcctggctcccatcacccagcgacacatatcacattcagcctaagatagagttttatgttaaaaccggagagtatattgagaatcagctcatcaaaatgagtgacgtgtctagcgattctgcattgattacagaagaaaattttgacaaaagaaaggagtgtacagttatttatacgactacaggaaagtggaaaattaaacctggtaagccttcacagttactctatgataattcattagtgaaaaatttggtttctgcccatattaatttaactgcatctcattctgctttagttgaattgatcgaaaaaaactatagtgagtataactccaggcaggaaaaaagagtatccgatattgaagagcctaccctttggtatataagtgcggtgattacccttgctgctggatttactaacgagatattaataccaatcttaaaggaaaaaatagtgagttatttgtatggaaataattttgaattgaaagagataaggattgttaaatctggtattgaattcatatattccttaaaaagagggggaattttaagagatagtaaaaacaataaatatctgttggatataaccaaggaagccttggaatttgagaagcaagaacatcacattcagagttataagattacaaattaacatttatagctataagattacaacttcaacatcatgcaataaatttgttcaccttattataacttcttatagggcggtatctccgccctatatttttctctattctgatttacaactgtaaaatagattaaagataaagtatttaaatatttaattacgtccaacattatttgttatctaataatactcgtcattgttggaaaataataggaggttgaactaaactcaaatttcattcttttggaaggagttatcgatgtctaaaacccattattctgaatcattaaacctaaaatctcactggatgccatttagtgccaaccgaagtttccaacgcgatccacgccttatcgttgctgccgaggggcaatggctaaaagacgataaaggacgccagatttatgacagtctgtccggtctttggacctgtggggcaggccatacccggacagaaattcaacaagctgtcgctgctcaattgagcaccctcgattattcaccaggctttcagttcggtcatcccttgtcgtttcaactggcagaaaaaattgccaatttaacgccaggtgatctcaatcacgtctttttcaccagttcaggttctgaatctgtagataccgcggtcaaaatggtacgagcttactggcgagtgaaaggccaacccgagaaaactaaactgattggccgtgcacttggttatcatggtgtcaatattgctggtaccagtttgggaggtattggtggcaaccgcaaaatgttcggacagttaatggatgtagatcacttaccccatacattacagaccgatatggcgtttacgccaggtatggcggaaaccggcggcgcagaattagccaacgagatgctcaaattgatcgaactgcatgatgcctccaatattgcggcagttattgtcgagcctgtgtccggttccgccggtgcgattattccgcccaaagggtatctacagcgtctgcgtgaaatttgtgatcaacataatattttgttgatttttgatgaggttattactggctttggtcgcatggggcgctggactggcgctgaatattttggtgtgacacccgatcttcttaactttgccaaacaaattaccaatggtgccattcctttgggaggcgtagtggcaagcagtgaaatttatgaagcctttatgtcccagtctttaccggaacactccgtggagtttagtcacggttatacctattcggcgcatcccgtagcctgtgctgccgggttagcaactttagatctgttggataaaaaccatcttatccaacgctctgctgaacttgcccctcatttcgaaacggcccttcatgctctcagaaactgtccaaatgtgactgacatccgtaattgtggcttggtgggagcaattgagttggctgcccgtgacggtgataccgctgtacgtccttttgacgccagcatggcgctttggaaagccggtttttacgtacgctttggcggtgatacgctgcaattcgggcctatgttcaacgctgaacgagccgatttggatcggctttttgacgccgttggggaagtattgcatcacattgactgagggaaggatgtatatgaatcgtgatgtacccataaggtcttcaatattgttaaactcaaaagcttagaataaagcccaagagcacagctactcttgggctttttaagtttcaatccttccttatattatattggcacgctgccatgtcgcttcagagaacaggaccatcccgtccccatcggagttatgtgagagcatgacatcgataaaataaatggtttgaggagtggttaacatggtttcacaataggttgcgtcaaatgttgtccaacgctcacgaattacctgtgttgtcgcatatgcgtcagggacaacctggacattagcagcagtaaacaaagacaaattacgcgacgatgcagcaagcaaggtctgttttgtattattcgtcgcacttctcatatcgatatatgatcgaatcatcgacaacataccattacaaagataaaacacagaaatattgatcttctgccgatgaggattttgcatcaatgctcgttcaatatgggactcaatgtttgggattaaatctctggcaccatcaccaataaatgccagaatattctgggatgatgtacgagccaaataaggcagtgacatcaacgcatcgcccatcagtgcccggccataccaaccggaaaatcctttccctgttttcggtaaattccgcatcgccccgattccgcacctccctacatcataaacaccggtatagacaaatccctgctcactaatcagatgatgcaactgcttccctaaatgggcataaaagtaattgggggacatcggcacctgtggcaaccaatctatcggggtgatgttaggataattctgaactcgttccagttcgcgacgacgataagcaagtaccttttcatccacattaagtcgagtgagaacggtttttaagaatgagcgtaaatagctatgtacagctagatcagtgtaaggtgacatgtgctctaaacggcaattcacctgaataatatgacatttatttttaagtttactggcggaaaatggcgaggatgcttcatcgactttacttttaaggaaaaaaatactctggctttcaggatcagcaagctgctgcccctcatgtaggtaatgaaatactttgctgctaaagccgtaaaccgacagaattccaatatagttactaacaggcttttgctgatggtaatcactgaccgcccccggagatactagcgtatctactaacgctatccctgctttttcagcaatctgataaatcagttcacgttcatgatccgttaaatgacaacattgccacagtatacgacgcttatcatggttgatcagagacattactgcatccatgacggacgcttcattatccccaatctgtggaaccaaaaggctccactgactcggatgaggtagctgctcaggtttcagtgtacattccaaaactgattgtgtcgcaagaataaacactgggccgggttgagactgcaatagatctattgcctcatttaaccgctcaggcaagttcaattgatcattgatataaacgcacggaattccttttgcttcaatcgacttcttaccatcataatctctatgcatcgtaccttgaaatgggaaccagctatttccaggactatctgcacaaatgatgatacctggcgcatgagcacgtttcaggttgcataatgtgccacgaaactcatcgatcatgccggaagttaccgcaattacataaccacgttgatagaactgccagccacaaagtgcagaaactgccagactgtgctcattcggcccactttcacacagggtagatgtaccatcacacaaacgaagcatggaatcgataaatccggagatcatcgacccagtatagtagtggaagtcccaacgctccttgaagtggcactccatataatcatgaataaactgtgccattgatgatattgttactttagacgtcgtcgctctaacaagtaatggattaatataagtgctatccaaatgatccattaggttttttagcacctgtatctcccaaacaagcggatctggctgccaaatattgagtgtcactgaatccatctcttgtattcgtgcactaccaggaatcatctctgataaagagagcaggaaagaatagggtgacaatttcccaggattcgactcaaacaatcggaaaaactgatgactgacctgctcataatgtccatgttgtaaaaacagatcatcagcaattaccagatcgagtgttctgtccggatgccgtgcgatatcggccagagcttcatccagcgtttcataggtcatgacatgaaaagaaaattgatgctttttctgatagacaagtaaatatcctctagcttgctgaagcaagtacgtcataatagaatcaactgaaactgttgaattaagtttccaaacctcacaaggatcagattcggccgcaattgacaattccaacttgttaatcgcttctttcactccttggctcacgatttgggactgagcaaccacacaaattccgatgtaatgatgcatttactcgcttctctacaattaattatcaaaatattcatcttgattcttattcaatattgagtatacaaatttctattcttttttaagttttatgtgatctttgtaggtgtatcgcaaacacggagacaagtgggcgcaataatagccctattaaagatcagttttttcttggtcgaaagttctaatcttggaacaagcacttaattctatcttttatctagaactcagttgtaaacctgaataatataattacgtaatagtacaaagggggataccgactggtcgaaagtgaatcctcttcgtattggatcttcatattctaaacattaaaccttagagttaatttggtataacaaggagtagttatgaaaatattaaatattataattttatcgctatcgacagtgatagcttctaattctttagccgatgagattagagcaagggatttaggcattcctttctctggagtaaccgggaaatataatgcgattaccgatgttagtggtgtagaagttggctattcaaccataatagaaggcgatggaaagctagaggttggaaaaggcccaataaggacaggcgtaacagctatattgccaaaaggcaagaaatttagcccggtattttctagtacattctctttaaatggaaatggagatatgacaggcaatcaatgggtcaaagagagtggtttcctggaaacgccaatattaatcaccaacactcatagtgttggtattgttagagactcaacaattagctggatgattgataacaacctaacatcaccactgaaagatgatttattttggttattacctgtggttgcagaaacgtgggatggaatattaaatgatataaacggtatgcatgtaaagaaagaacatgtatatcatgcgttgaatagtgctaaatcaggagcgatagaggagggtaatgtcggcggtggaacaggaatgaacctttttaagtttaaagggggcacaggtacttcatcaagaattctagataaaaaagatggcggatatactgttggcgttcttgttcaaggcaactttggtgatagggacgatttgattattgctgggattccagttggtaaagaaatacaggatctcaagccgatatatcatggcggcaagaaaaaaataaaggatgccggttctataatcgccgtggtggctacagacgcaccattagcgcctcaccaattagaaaaaatagctaaacgagtctctcttggactagcaaaggtcggtggggtagccaggaatacgagcggtgagatatttattgcattttcgaccgcaaataatgatgctttctccagaaaagatgtaagaacaataaaaatactgtcaaatgacaaactagatcccttgtatgaggccacaataagtgcaacagaagaagcaataattaatgctatgatcgccgccaaaaaaatggttgggagaaatggcaatacttcgttttctattcctaaagatagagttcaagagatattaaaaaaacatcatgtcttagctcagactcaatctgacacttcaatttaaaacaaacaagttaccgactgtgattaaaggttgtaaatcttaagttgaagtcggtagctttcatgttccaacaatacgatgtatgcagtatcctttgttcgttatgaaaaacagggttataaagacagaattatttttgtgttgtcgttatttttaggagctgtaacccatattgtctgtgatgcattcacacacgataacggttttttttgtcgagataattcctctacctgtttaatcttgatcgaaagagaaatattatgtttaaggtcaatcaacactttgaatatatggtaaccaaaagaaaaataggaaatatgatcattcataacaaaagcaaaaaccccattattttaaacagggtttgtcagtgttcttagttaatacaaataagagactttcgatagaattttattttgccctaccttcatagtaagcagcataagcggtacgtccgttataattacaagatttaacaactccttttaaataccacttaatcgttttaccactatatttctgttcaaatgcattagcaaattttttttgagtattaacaacatgcctagtatacatcgagccctttttgtttatattctgactcggacatttttcaagtgccaatgcactcccaactcctccagttaatgtaatacccacggctaatgccccaactgttaataatttcttgaacataaaactctccttaaatagtttcagaatttatatatttaaacatattaattataaaatcatatgtgataatgtatgcaaaatataaatcatcacatcgatgatgttacaattttaaaattcaaaaactgcttatatttttcatcctaggttggaaatataacttccattatcttctcagtgtcttaaaaagcctctaataagaggcttttcggtataattttaaacttctctaccttcatagtaagcggcgtaagcagtacttccgttataatcacaagctccataacgccctttaaaataccatttaatcgttttaccaacatcagactcataccgagtaaatacattagcaaaattgtcataaggattaacaacaattctagaatacttcaagcccgagctatctgcgcctgctacgcttacgtcctgtcccggacaactcgctgccgatgcagtcccaatccctccaattaatactgttgctaatgccccaactgttaataatttcttgaacataaaactctccttaaatagtttcagaatttacatatttaaacgtattatttaccaaaatcatatgtgacaatgcatacaaaatctaaatcaccacattgatgatgttacaattttaaaattcaaaaactgcttatattttgcatcctaggtgggattaggttggaaacctaaattccatttaccataatagtagcagaaatcaaaaatggcaaatctaatatataatgacaatttattttcctatagtttttcatgaaactatctttaatgtcagtatatttaaacctctctggaatttatgatttatctcacatatttaatctagaaaggtaacaatctggtggtgttttaaataagggcaagtcggcgctgataattgagatcgtttatatttcactcactcacgcagaatgaattttctagtaataatgtcaaccaccctgactctggatgatattaatgtgattaacatcaaacatttttactcattattttttcagaataatcatggtaaaaaattctttttataattattgccttcaaatgctatatctattaattataatattcctgaataagtacttttatcgtaattatatgactaccaaataaaaacattcatgattctccaaaaatatcatttttatttttcataataaattcattttttatattttcatgtaaaaagtgaatttaatttaaaggttaatcgtcaaacataaccaaacatgagcctcaaaaaaataccagtgtgttcatccagaaaagtaggagaggagggtaacaacatattaggtaggaggaaggctatcccggcaacgccgggaaaacgtcgcagtatgcgatcgtggaaagcaataacttcttgagcactcacccaaatcatcggtcagtcaacgctgctactgtgtggccatgacgttgcatcatagcatcaaattcggcatccagttttgcattctgatacacctcgaattccgctttactgatcactacggcaacgctgccgtcccgacgggtgatttcaacgggctcaccattgactgcaatatccagcaccacagaaatattggctctggcctgattgaggtataggtttgcatagttaacccgaattctggataagaaattgacatgaagcctgttccaggagcaatgttttggtgcacgccgaaacagctccggggaggaacaggctatgaacaagttagttgaaattttctgcgatgtcgatgatttttgccgcttcttcattcctcaatgggaattattttgtttcgaaaaagggtaccgccagcgtcatcggcaaggccatatgcaccccagtgaaatcatgactattttgatcctttttcatatggcgcattaccgtgattttaaacatttttatctggaacatatttggaaatatcaccacaaagatttccccaccctgctcagttatacccgttttgtcagtgttgccccttccgttttggtcccactatgtagttatctgactcaattaaaaggaaaaccgaccaagattgcttttattgattccacgagtttgtgcgtctgtcataacatccgtatcccgcgtcataaggtttttaagggaatagcccagcgcggaaaaacatcaatgggctggttttacggcttcaaattacacttggttgttaaccatcagggcgaaattctcgcgctaaaagtgactcccggtaatgtgaatgatcgagagcctgtacgcgaattatcaaaatcgttaacgggttatctttacggtgataaaggttatctcagtcaggaactggccgatgatttagccaaaatcggtgtgactttcatcacgaagaaacgccgtaatatgaaagcacaagcgctgtctgagtggaataacttaatgttaaaaaagagatttatcatcgaaacgattaacgggcaattaaagaccatttctcaaattgagcactcgcgccaccgaagtataaaaggctttctgttgtgtgttttaggtggattgattgcttacagccttaaattgaaaaagccatcactgaaaattttctactcagagaaagatattttaatgacggcttaagcagaattcgggttagttatctccttagaaagagaggggtatcaaaaatcacctagttctatgcgaagttgttcatcgtctaaggttatttaacataatatacattatgcgtactatgattgtagcaccaatatagtcatgtcactttggtatacttaaaagaaaaaacccgcttttagttaaatccatatcaacataagcccaactgccgccggtacaatcttcattgcttagatggtcagcaacagttcccgcttgcgctggagcctcacccttttcgctcatgtattcaaaataagtatccaatgcgttttgagcaccgctaatagcgtcgtcaatagtatcgccagcaaagtaacatccgatcacgtctggcacaaaaccggaaaacgatccgtcgtcagcctgatgtaaataaataggatatctcatgcttacaccttctctttgattaaagagcggcctttcgaccgcttaattaagttatttcagtcctgcttgtttaagtattttaataacaatcaccgtaacttattctggaaagtcgagtatatcaacgtccatcgactggtgaatgacgcgtgaaatgaagatgtcgtcatcctgcaacatgtaatagatggaatgcttcttgaactcgaagcggcgcattcctgcgcatatccaatcacattccctaccaatccagggagatatggctagtaactcgaaagttcttttcagttcatcgtgataacgcttcgcctggttttgaccaaattgctgtatcgtataacgggcaatatgaaatatgtcgtcatcagccaattcggaaaacttatacatttaaatccttcgctgccattacaaaaatatcatccatgctgtttttgctgacaggagaattcaggccagctagcaccatttcacgaacattctgaatacgctgctcgcgagcctccatcaggcgcaaagcatcgcggacaacttcggatgtgttgccataacgaccagattggatcatatcaccaacgaatccgttgaagtgctcaccaagggttacactagttactcgtgccataaattcgtctcttcatgtattactgagtaatacaattataacaaggcataataatgatcgccagcggactatgttaatcccaacgctgacacgttttttcgtcttcgtacttgaatgatttttactcaacgggtttagaaagagggatatctttttgccccgcgtagaagaccacgagagtagcgccctctttgcctgtgtaaccgcgatgagtgctgtcaaccatctcggataacacctctcccgccttcataagacgtttttcaccactggattttttctctgccgttaacaccccgctcaacacgtaagctgcattaggtatcgggtgctcatgccaggcaagactggtatttggagcaatagtaattttgagaactgaaagctgaggagtgcctttagggtattcctgataagacacgccatcccaagacttttcagtctcaagcaatttttcaacgttaataccagcagtattgccgctatgggcttgagtgaaaaacggcgcaatgaggaaagcaaaagatgtaaaggctgataaagttcgaatagatagccgcatatggaatccttgtgcatagtgcataaattgggtagatgccctgtggagaaccataccatgcgcaccatgattactttagaactttttaagatacaactttctcccctgaaaactccgaaaacatcattacatcacaatgtctgttgaaatacttaggatttacttgaccggcacaaaggatacgagtatatatttttcataaattttttttatatatctgtattttcagcctcatatacccaatggatttcaagatgcatcgcggcggcaagtgagcgaatccccgggagcatagataacgatgtgaccggggtgagagagtgcagccaacaaagaagcaacttgaaagataacgggtatattcatttatctagatggatatcctagctttattaaaaagttagcttcttgttccatgcttttattttatataacaatttattaaaccagaaaatatgaagggaggaaggatgagcaatgttatcagagaaataagtgacgctaatattgcatatgcagcaacttttggtgataaaaaaaaccttggtttacctgctgtcaggcgatttgccatattgacttgtatggatgctaggttagatccagcaaaatttgcaggtttatctgaaggtgacgctcatattattcggaatgcaggcggaagagccagtgatgatgccattcgctcacttattatttcctataaactttttggcacaaaagagtggtttgtcattcaccatactaattgtgggatggaactttttacagacaatatcatgggcgatctactggaaagcagcctggaaagcgcgataatgacggatgaaggatttaaagatgtcggcaacggtacaggatcatctgaaggaaaatatatcaaatggcttactattaacaatcaagttgatagcgtagttgaagatattcatcgtattcgtacccaccctcttgtccccgcaaatatctccatatatgggtacatatttgatgtgaagtcaggaaaattaattgaagttcccgaagcagcaagcattgcagaagatgcttgatttatgatgggctttatttaaatttatccggcgtcaatgtggacaaggatgttcagttaatctcccgccctgtatagttaatcagacaacacgactaatcctcatcctccgttggtaaaatagcattgggtaaagcgctaaaagttccccaatagaaggcaattaaagagatcactgccactgccacaatatcccaaggcgcgggaataattcccttaccgccaaatgtgcctaaataggacaaaatgatcatggcactgtaaaaactaatcaaccataaagcagaggttatctgttgacgcaaactcactttgcctatcggaactttatttttaaataacaagtagataaaaaacaagataatctgtaatccaagtagccaagaaacggttttccaaccagaccagtaaacaatgaaggcggaaataataaaggaaagcggaccaatgatcgcaaaccatttaacataaaaaggacgttttatctccttggcattacgacgtaaggcagaagcagttactggcgctaatgcgtagctcagaattaacgccgcagaaacaacactgatgagtttttcccatgaaggaaaaggtaatgtccaaaaaacagaaagaataaatgtcaaccaaagtgcaggacgtggtatccccgatttttcatcaacatgggtaaacacattaaataacgtcccactttttgcccaaccataaactacacggggagtggcattcatataaatattcccggtaccacttggagagatcaccgcatcacataccaccaaaaaagcgagccaccccacaccgaggattaaggctatatcacgaaacggcaatgaaaaatattgcccaatgttattccagccactaaaaagtagatcagagggtatcccaccaaggaacgctaactgtaataaaacataaataaccgtagacagtgaaatagagagaatgagggcaataggaattgttttttggggtttttccacttcaccagcgacggaaataatgggcgttaggccaagataggcaaaaataatgcctccggttgaaaccgcagcttcaatacccgatatcccaaaaggagaaaatccgtgaacttgcagattactcggattgaaataattaaataggataataatgacgagcagcggaacgataaacttgaaaatactaataatattgttggattttgcaaaggttttcacgctgttgtaattaaggtaaaagaaaaatgctaataagataaattgaaccagccagcctgtcagagtcggatcacccgaacccggctgactgagaaaggggaaccacgccgccgcatattgtcgagcagcgacgacttcgatggctattaggctggaaaatgcgattaaggtgatggaacccattaaatatcccatgagttcgccatgagaaaacaccggataacggataatgccacctgatttcggcagtgccgcacccagttcgcaataaacaatgccgagtaacagcacggcgataccaccaatcagccaggaaaaaatcccggcaggccctgcaataacagacacatgactggctgcaaataaccagccagaaccaaaaatagcccctaatccgatgaaggttaaatccgtgagtgttaactgtttcttaaatttaccctgccctgaatcggattttggccgtgaagaggctttgtatagcgccataattattcgcccttttctgtttcttatttgatatacgtcaaagtcgggtaactgcgcgttttacaacacttcccggctcatcaccccattgattaatcgagaaatatttaacggattatggtcttgcagtgcgagtggaagtaaggatttaggatagttttggaagcagactgggcgcagaaaacgccagatggccagtgtaccaactgaagtccctctcacatcggaagttgccgggtaaggcccgccatgaaccacggcatcacagacttcaacgcctgtcgggtagccattaacaaccaccctgcccgcaatgttttgtaatcgtcgactgagctcatgtgcattcgctaattcatcgtgctcaccaattaaggtagcggtaagctgcccctgcaaacagtcaattgcgcgtaaaagctgatattggctttcggcttcaaccacaatagcaacagggccaaaaacctcctcttgtaacagagcatttttattcaacaataaagcaatatctgcacgatacaacattgcacttgcctgattttcatgatgttcgccaatggctaaccgtgtcattaagggttcatcatccagttgatgaatacctttttggtagttaagtaatgtgccttggttcagcattgactgcgccgggcgaagcgtgatttcccgcgttaattgagtaataaattgatcaaactctggtgaacgaatacccaagattattcctggcttggtacaaaactgaccgctacctaatgtgaatgaatttgccagttcttgggcgatcggtttcccccgctgtgctaaggcgtttggcagcacaatgaccgggttgatactcgacatttcagcaaaaaccggaataggttgtggtcgctgcatcgccatatcgaacagtgcacgtccaccagcaagtgaaccggtaaaaccaacggcctgaataatggggtgtttgactagatcggcccccacgctattgccataaatcatattgaatacacccgcgggcatttgtgcggcgataatagcgcgtccaatggcttctgcgatgatttcggcagtagccatatggccactatgtgctttgaaaacaacagagcagcccgccgctaacgctgacgccgtgtcaccaccagcagtagaaaaagccaacgggaaattactggcaccgaaaaccgcaatagggcctagaggaatatggcattggcgaatatcaactctagggaggggttttcttgcaggttgcgcagtatcaatgcgggcagcatgcatatcaccacggcgtaacagcgtggcaaacagcctcatttgcccgctggttctcgaccgttcaccttgaattctggctggtggtagcgccgtttcttctgatacaagggcaatgaagtcatcaccaagagcatcaatttcatcggcaattttatctaaaaaaacggcacgttcttctaacgatgtctggctataacgggtaaatgcatcggcggcggcttgggcggcgagatcgacctcatgtcgtgtagcttgataaaacgcataacccgttggtgcgttatccaccgcccgccgactgtgcaaacagcgttccccctctgcttgcctgcgaccaccaataaactgcctacctgaatgtgttaccaacatagcgcttcctccaaggatatcaaaaacagttaccgctccattcagagaccgacatcaggcagtgaaggacgattagcaagggcttgttctacaatggcgcgaacttcagccaatgtttccctttcgagaggtagacgcggtggacgggtaatggcactcccacggccaaccatctcttcacacaacttgatgcattgcaccaaatcaggacggaaatccaaatgcaacagaggcataaaccagcgatataattcccgagcttcttcataacgtttctgtttagccagacggaataaagtctccccttcccgtggaaaagcattcgacatacctgaaatccaaccttccgcgcccactgcgactgactctaaaacgacgtcatccaaaccagcaaaaagaatgaagcgatcacccgcttcattgggaatatcactaaaaggacgggtattgcctgatgaatctttaaatgccacgatattttcgcaatcggccagagaggtcagaattttcggcgtaatatcatttttatacagcagagggttgttatatagcatgacgggtaaatcggtagaggccgctattgtacggaaatacgctcggttttctttcggtgttggcgtataaaccagtggcggcatgatcatcactccattagcccctgcctgacggcattcagagaccattttgcacgcattatcggttgtcaattctgcgatacccgaaagaacgggaacttttccaccagcaacatctaatgcgagttcaacgatagtacgcttctctttcatagacagagatgtattttcccccacagaaccattgacgactaaaccggaaaccccatctttaatcaggttggtcattaccttctgtgtggcatccaaattaatggaaaaatcggagttaaattgtgttgtcactgctggaaaaacaccatgccaattaacttttctcttgttcatcgctctatcctttgatcgccattgatttacttgatatttagaatacgaattgtttttatcttgttaaaaaaatgtgattcattggttttaatggaataatggctatttcactacagagaagcttgtcacttttcacagtaaacaatgacgaaattagcataataggaatggcaaacttattggatcacaaaagaacggaaagactggaagcatgagtaaaacggtaaattactccacccctattgactgacgaaaatcactgggcgtgagtccagttgaggtcttaaattgccgagtaaatgcgctgtgatcggtataaccacatcgcaaagcgacatctgtgataggtaattccgtcgccagcaattcagacgctttttcaattctaattttgtggatcatctgccgaggtgtcaggtgaaagatacgtttacagtaacgttccaattgagcaaccgagaggcatgttaaatgagttagctcgtcgaggcgaattgttcgatcaaaatgttcacgaatataatcatcgacgatagccaacttttggtacacagggtgattttccttaacttccatcaaatcatgagaaattcctgccataccaataatgtgattatgttggttatacaatggcaatttatatgtcatgcaccaacctgctttgcgtccatgataaaagtggagttccagttggttttggataattaccccttgatgcaacacacgtaaatcctgttccgtgtaacaactgcccatctgagcaggaaagatttcggaagaggttttaccgagtagcgaagagatcgacttaaacccgcagcgtgtggctagcgtaaggttcgcaattagataacgtgctttaatatctttgataaagaaaaccacgctgggaatcgcatttagcaatggtgtaattaaggcaaccgcattgagaatatcttgcaggttactgggtttgtgattaactaatccactacaaagcgccgctaaaaactcaacattacaagcatcatgaccatttgtgccaatgccgtttcggtatatattcatcatcgatatctccagtctattacccgtaaaataggatttttgactcgtgtctggttaatttgattttatagattaatttatacattgttcttctggtaaaaacagaaatcatcatcagttttatttataatttttcattgtgctgatttcagcatattgcagtatgaaattcatcaagcggcaaacgaaatactacgccactatttataccctatggatttcaagatggatcgcgacggcattaaaaatacgttaattgggtggctttatggcagataaacatgattatcagattgttcgcgtcattgattcacacaccggtggagaacccacccggacagtaatcgagggatttccgtctcttggcaaaggaaccgttgccaaacagtgtcaacgctttgaaaccgaatttgatcactggcgcaaggctctcattcttgaacccaaagggaatgatgtgttggtcggtgcacttttatgtccgcctgctgtacctgacgccgatatgggagtgattttctttaataacgcggggtatttaggcatgtgcggccacggcactatgggccttattgcttcgctccatcatctgggctggttgacccccagcaaatataaaattgagacgccggttgggatggtagaggcggtactccatcaggatggcgcagtgtctgtttataatgtcccctcttatcgttatcagcaaaatgtcactgtcaacgtgcccggtgtgggtgatgttaatggagatattgcctggggcggaaattggttttttctgatcggtcagcataacctgtttctaacccccaaccatatcgatgaacttacgcaatacagttgggccgttaggcaagcactggcccaagcggggatcaccggtgaaaagggtgagtgtatcgaccatattgaattgtttgctcctgataaccatgcggatagtcgcaattttgtgttatgtccgggaaaagcctatgaccgttcaccgtgtggcactggaacaagtgctaagttagcctgcttagcggcggatggaaaattgcagccgggtgagatttggtgccagtccagcattattggtagcgtttttgaagcccaatatcagtggattggtcagaaaattgccccagtgatccggggaacagcgcatgtttacggtgataacaaattaatcattgccaagagcgatccttttgtctggggaatcaatgtatgacgccctgccaaatatcggatgtcattatcgttggtgctggcatcgttggagccgcatgtgcttatcagttagtacaggatggtttgagagttgttgtgattgataatggtggtaaaggggcgacacaggcaggaatggggcatctcgtgtgtatggacgataatcctgctgaattggcactgagcagttactcattagatatatggcgaacattcaccccacatatgccagaaaattgtgcatggcgtggatgtggcacactttggctggcggatgctgaggatgaaatggcacttgctgaggaaaagagcgcacgtctcgccgcctatggcattgagaatatgccgatgacagcaacacagattcaccagatggaaccgatggtgaggcgtgggattgctggtggtttgtctgttcctggggatgggatggtctatgcgccgaatgtcgtacactggtttcttgctagcggtaatgaaaaaattcagtttattaaaggccaagtgcatgccttaaagcctcagaccgttgtgctacgtgatggaaagaaatattgcgcgccgagaatattgttagcaaatgggctgtggagcacacatctgttacctgaattaccgcttgttcctaaaaaagggcaattggcgattaccgatcgttaccctacctgcatcacacatcaactggtggaattagggtacagcgccagtacacatgcatcgaatggcacgtcaatcgctttcaacgttcaggctcgccctactggtcagcttttaattggatcttcacgccagttccataacgaaaaacacactattgatctcggactactccgttctatgctccagcgagcacttcattttttacctcagcttggtcagatgaatattctacgttgctggtccggctttcgtgctgcaactccagatggcttgcctctattgggacagcatcctgcttatgaatggctatggctggccgtaggccatgaaggattaggtgtgacgaccgcaccgggcagtgccaaaatcatctccgcattgatgctgaatagcaaaacggagattgatcccttgccttaccagcctgcacgttttactgctatggcccatcagaggttgctatgacactcaacaaacccccatttattgctctgtttatcgatggcgaattgatcaccgtgcctacggggattactgttgcggcggcgctagcttataccggtgatgaacattgccgtatatctgtatcacatcaattaagagtacctttttgtggtatggggatctgtcaggagtgccgtttgatgatcaatggtcaccactgtgtcgcgtgccagacagtttgtgaaatgggtatgaaagtcgagaggatctgaacatggcaacatcatcttcttctacagtattgcgttgtgatgtgctggttattggtgcaggacccgcgggattagctactgcacaggcggccatacaagggcaacaatccgttatcctgattgatgacaatcccagagcaggcggacaaatttggcgtcaagggccatttcatacattgccaccgatggcgaaacgttatttatcagtaacatcagaagatgccctgatctatttacccggttgtaaagtgattgcagtagacaaccaatgtgtgattgttgaaacggcaagccggcaccgaatagttcactaccaacgcatcattctttgtactggagccaaagaaaaattacttccctttcccggatggacattaccgggtgtcacaggtgcaggcggattacaggcgttgataaaaagtggtctccctatgacgggtgagcgtgttgttattgccggtagcggtccccttttgctcgcggttgcgcagacggtaaaaaaagcgggaggaaacgtagctggtatcgttgaacaagcgcctttgtaccgcttattttcgtttggcttgcagttgttccgctggcctaacaagttgcatcaagccatcacgctcataccgcttaaaaattattacaaaaacagtatggtgttgggagtggaaacctcggtagaaggcaggttgactggcgtgtatatcagcaataaagggcagaagcagaaactatcctgtacgcgtttagcttgtggttttggtttaagacccaatacggaattggcacaattgcttggttgcttgctggatgaacaaggaaatattcaggtagatgcgtggcaacagacgaccctatctggtgtatatgccgcaggagaatgcacaggtattggtggcagtgagcttgtactttgtgaaggatttattgccgggtttgcagcaagtggtcaatgcgctctggctgaaaaatggcggcaaaaacgagtaaaatggcaacattttgcaaccgcggtggcacagacgtttaaattgaatgaagagatcgcacgggcgcttccacccgataccttgatctgtcgttgtgaagacgtacatttaaacgagcttgaaccctttcaggattggaatagtgcaaaaatggcgacgcggtgcggtatgggggcttgtcagggaaaaatctgttctgccattctccacgatatcaaacattgggcaataccctcccctcgcattccactatcccctaccagtcttgaaacgctggcagcaggagacacggaaaaaattaacttttctgattgatagataaatatcccccttcgtttatcaaaccgaattcccactaaaaatcacagtttgtttggtcacctttgctatgattcacctcaaaaatcattaaaacctgtaatgagttactttagagattgaggtgtgaacatttatgcataagacaaatggaaccattttagatgtaccgggtgttaaggttggacatgctgaagatgagttgcaacaaaccggttgtagcatcattattttcgacgacggcgctgtttgtggcgttgatgtcagaggctccgcaccggggacaagggaaaccgagcttttagatcccattaacactgtccagaaagttaatgccgtggtgctaagtggagggagtgcttttggattagattccgcctctggcgtaatgcgctatcttgaagaaagaaaaaaaggttttgatgtcggtgttactgtcgtacctatcgttcctgccgcaataatttttgatctaaattttggcgatcctgcggtgcgtcctgacgctaaaatgggctaccttgccgcacaaaacgcttctgtaaccccttttccatcgggaaatattggcgctggcaccggggccactattggtaagatagctggttttgacaaagccatgaaaggtgggcttgggaccgcatcggttaaattacctgatgggctaacaattggcgcaatggttgttgtaaatgctgttggtgaaatcagagaccctaaaaatggtaaaactattgcgggcgcatgtgatgaaaacggtcatcttatcgatctcattccctacattataaaaaataataaagataataatttcactcagggaacaaatacgaccattggcataatttgttgtaacgccaatatgaataaaagccagatgaaaaaagttgcccagatggctcatgatggtctggcgaggacaatataccccgttcataccatgagtgacggggatactatttttgcagcggcaacaggtggtgtggactcatcggtgaatattgttggtattctcgcggctgaagtcatggctgctgcggttttagatgcggtgaaatcagctaaatcaaaatttggtgttagaggttatgccgatttagcactttcgatttagcactttcgatttagtactttcaatttagcacactttcgatttaacacttttgaggtaaggtaatgctggtagccgccatgcaccagtagccttccaaacttgaactaccctaacaaactcgataaaaaggttaacattatgtcagacattcgcctgtatatgctgcaaaccggaaccatcaaatgtaaggttcacaacattaagatgaatcagggtaatggtgccgattatgaaattccgattcccttttttttactcactcatcctaacggccatacgctaattgacggtggcaatgcagttgaaactgcaactgaccccgaaggctactggggaactatcaccaaaacctactggccggtgatgcgtgaagatgaaggttgtatcgctcaagttaaaaagttggatatcgatcccgcagatatccgctatgtggtgcaatcccatcttcatctcgatcacactggtgcaataggacgcttccctaacgcgacacatatcgtacagcgacgtgaatatgaatacgcctacacacctgactggtttgctgctggtggctatatccgcaaggactttgaccggtcaggtctgaaatgggagtttctcgatggggaacgcaatgacatgtttgatgtttacggcgatggcacgttaaaaacggtatttactccggggcattcgccaggacaccaatcactactggtcaccctgccgaacagtggtagcctgctgttaacgattgatgccgcttataccctcgaccactgggaagaacgggcgctgccggggtttctcacctctaccattgaaaccgtacgttcggtgcaaaaactacggcatctagccaaacgcacgaatgcaatcgtggtaacgggacacgatccagatgcctggccaacattccgtcaggcaccggaatattacgattaactcgaatttgtcaatccaaaatagccagaaactagaaagtggatgtttctggcttggcactcattttacgaaagtttaaccaactatccgagaataaccgttattcctcgtcttatcctcttagccaatcattgacaaaagactgggcattttcagatttaaatcctatcgaagatatgccggttggcttccataagagctcgatagcacgaatcttttggttataatcaagagcattaaagatttcatttaattgttcatctaaaagcaaatctcgatattgaagaaaatattcatcattgaattgatcgcaacatccagcaaaaagcttattgccgttttcacgattgaacccacaacatctcacacgtttaaagccagcttgataataaaaatcgcatatttcatcatatctgtatgcgttgacgataggattcaaaaatgcatctacattaacagcaacctgatcaacactatcatctaaatgattagctgtactatcgccatattgatttcgacttaagttatcgcatagcttattcattaaatcagtatttaaaaaatactcttctgcatgattttgttttacaaaaatctgcaaaagttctcgctgcctcaatcgttcatattctcctatcgcgttgtatagccaaataagcgctatcccctcttcatttaatgaacgtgaagcggctaaaaaaccctcttgtggaaattccatatgatggataacaccggtagaaacaacaacatcaaattgattatctcgtgttagcttctcaatcgtattattttctagcgtgacgttatccaactgatgataagatatcaacttatctgccacctctaacgctttatccgtcatatcaatacccacaaattgggtatcgggatacatacttgccagccctaacaaacgatgccccgttccacagcctaaatcaagcacatattttcccgttaaataatccggcttaaatataagccttatcaccgtagccatatcataaataagattgtctccaatagcagaactaggatatggatatcggttatacatcgctttgacgtcctgattactcatatttatttctccgaacaaaatgacaaatcagtagtactagcctatgatcacgaataatagattacaaatgatagtatagatatcacccgcataaatttcatgacaacgagtaataaaatatttcataattgggagaaaaatatcttaaattcaattggaatagaaattagagagcagtggagttattaataatcacattaataaacatcttaaatagttgaagatcgaaacaagatgaatattaatttattcacacaaacatcatttactgtcatgtggtcttgaatacgtaaaatagacataaagctatattaacactcatatcactataaagtgttaattttatggaaaattataaaacttaaacattaaaaattcactttgacaatttaagcgatcaattttttaattaaatattgcttaataaacagagacataatttttttgccaactatttttagcgataaaactccaagctttcttgctctatttctatgtacagtatatttttattttaaatactacaaaaaagtcatggctgtaattagataatatcaaatagatataatcaccacgatttagccagaatcgctcgtatctacaacaggagaaatactatgcatgtcggcattattggggcggggattggtggtacatgtttagcccatggattacgtaaacatggaataaaagtgacgatatatgaacgaaactctgccgcatcatccatacttccgggttatggaattcatataaattcattcggtaagcaagcactgcaagaatgcctcccggctgaaaactggctagcctttgaggaggcatcaagatatattggcggacaatcccggttttataatgaacgtatgcgtcttctcgccgttcatggcggtatttctccaatggcagggaaaattatttccgaacaacgtttgtcaattagcagaactgaactgaaagaaatactcaacaaggggcttgcaaataccattcaatggaacaaaacattcgtccgttatgaacatattgaaaacggtggtattaaaattttctttgccgatggcagtcacgaaaatgtcgatgtccttgtcggtgcagacggtagcaattcaaaagtacgtaagcagtaccttccttttatcgaaagattcgatgttggtgttagtatgatcattggtcgtgcacgtcttaccccggctctcaccgcgttgctaccccaaaatttccgcgatggtacacccaatagtatcgtccctaaaagccccgactggttgttcatctctatgtggcgtgccccagtgaatattcatgtagaggcatccttagcggaaatcgataattttatcgtatgggtttacgtagcagcaacagatagtcttcctgacaatatcaccgatttttccgctgaagccctctgcgatctggttcaatcgcgtatgatttcgtgggacccaagcctacatactctggttcaacaaagtgatatggaaaacatctctccgctacatttacgcagtatgccccatcttctaccctggaaatccagcaccgtcacattacttggggatgctattcacaacatgacgccaatgacaggctcaggagcgaacacagcgctgcgagacgcacttttactcacgcagaagcttgccagtgtagcgtccggccacgaagagttagtcaaggcaatttcagattatgaacaacaaatgcgcgcatatgctaatgagatcgttggaatttcactgcgcagcgctcagaacgctgtaatacatttttcaataccaccattgaaacaacggcatttgagcataagaagaaataaatctcaaagtcatcaacaccgacgttaatattccgagtaaattgtcataccggaacgaattccatatcattactctagatacacttatacccaatagatttcaagatggatcgcgacggcaagggagcgaatccccgggagcatagataacgatgtgaccggggtgagggagtgcagccaacaaagaggcaacttgaaagatgacggatatattataaacgccaccagtagatatatcatactggtggcttggcttaattaattatgcaatttttacccaaggataagcatcagatgttcctgcaccatctggctcggtgcctctattccaccatttagcttcccaattttgattgttccaactcactctatcgccggccttatatgccctatttgcatcccagacagggtaatcactccctgtatcgggatgaatgggatcaaccggttcaacattaacacccttgaagtagaatggtgtcatatctattttttccgtgattaactcacaaccaagcccttccctcgccgcattgaccaataaaccacgatcttgatcggcggtccatgtaaatattcctcccagattcttttctagtgcatattgtgctttagatttaacggaacgaggggtatcaagagaaataaacaactgactatccttattatagagataatcagcgtctgctatttcatcggtatataagtcaaaattatttcttcccctcttttcttccaaatccagataattatatatcgtgtcgtaccattctgtggtccctgattcaaacgagccggttgtggtaatcttcggttcttttttcgggacataaccaggatcataactgccggataatggagaataactatcaataaccgtatttctgccattgcgtgaatagccggtgtaaccaatattaatggcagatgcaggcacaccaagactcaataaatattcaaccgccttttctacactattctcaccactaggataattgcggagattggtgtgatgtaacaacctttcagcccacggcgtaccaaagaaatcataggtcataacgttaacaccatatagcccaacttgcagtaattcaggtatttttgatttttccattttctctggtaccgccgaacaagcgatacttatttttatatctgaacgccctgcttctttaaaagcagcagttaaatctttaattaaactaacataataatcgccatcgtctgacgcatacatgttaccttcatttccagcaacgcccggatattcccaatcaatatcaatttcggtaaacatagggaaacgttggaatatatccactagactcgaacagaaataggattttagtgtttcgtctctgaccatagcataaaagccattactcatggtccaaccaccgacactaaatgacataataagatcatggccttgagcttttgcagcttgttgaactttagccaatccacctaatacgcccatacttttagattgatcgaaatcccttggcatttggatatcttgccaaccagaataagtacaattctgataagattggcaatctccccaagcatctgtgaatgtcacttctccattattggtgcgggcaaataatggcgcttgctctttaatttgctgcttcttttcgccctcatcacctaatattccacagaaaccaataactaatttatcataagcaaaaggattatctaaaaggtgctgtaaatctattcctctacctcgacgaatgggatcttgatttccttgtaatcgaccgtcatattgcgaccaatctgtataataaccaaaaactttaggtttatttcgtgtgtcatatttattatagactggtaatgcgattcttcccgatgtgtaactgaaatttattgtttcagttgatggattgaaattatctatctgataagactgttcactaaaagaatctgtctggattatttttgacataaatcacctcgactagatatcagtttatttttcgatgaacactccaattgctttatttacgtggtaacataattacattctagtttgtattcttaggaaaacaaataattgttatttgtttgattgttaatgatcaactaaaatttatgtcaacgggatttatattaccgaccatttactatcagatttcaaaaacaaataattgcaaattgtaaatatattaattgtcattgttacaattacctcctcaattaaatttgtaaattaatttttacgaaccatttattttaattttatttaaaattgactgctttttatattttatatctatactaatttgtatccttagggagttcgtttcttcaaaatattattaccattcttatatatggagattaaaatgaaagctaaagatgttcagccaaccattattattaataaaaatggccttatctctttggaagatatctatgacattgcgataaaacaaaaaaaagtagaaatatcaacggagatcactgaacttttgacgcatggtcgtgaaaaattagaggaaaaattaaattcaggagaggttatatatggaatcaatacaggatttggagggaatgccaatttagttgtgccatttgagaaaatcgcagagcatcagcaaaatctgttaacttttctttctgctggtactggggactatatgtccaaaccttgtattaaagcgtcacaatttactatgttactttctgtttgcaaaggttggtctgcaaccagaccaattgtcgctcaagcaattgttgatcatattaatcatgacattgttcctctggttcctcgctatggctcagtgggtgcaagcggtgatttaattcctttatcttatattgcacgagcattatgtggtatcggcaaagtttattatatgggcgcagaaattgacgctgctgaagcaattaaacgtgcagggttgacaccattatcgttaaaagccaaagaaggtcttgctctgattaacggcacccgggtaatgtcaggaatcagtgcaatcaccgtcattaaactggaaaaactatttaaagcctcaatttctgcgattgcccttgctgttgaagcattacttgcatctcatgaacattatgatgcccggattcaacaagtaaaaaatcatcctggtcaaaacgcggtggcaagtgcattgcgtaatttattggcaggttcaacgcaggttaatctattatctggggttaaagaacaagccaataaagcttgtcgtcatcaagaaattacccaactaaatgataccttacaggaagtttattcaattcgctgtgcaccacaagtattaggtatagtgccagaatctttagctaccgctcggaaaatattggaacgggaagttatctcagctaatgataatccattgatagatccagaaaatggcgatgttctacacggtggaaattttatggggcaatatgtcgcccgaacaatggatgcattaaaactggatattgctttaattgccaatcatcttcacgccattgtggctcttatgatggataaccgtttctctcgtggattacctaattcactgagtccgacacccggcatgtatcaaggttttaaaggcgtccaactttctcaaaccgctttagttgctgcaattcgccatgattgtgctgcatcaggtattcataccctcgccacagaacaatacaatcaagatattgtcagtttaggtctgcatgccgctcaagatgttttagagatggagcagaaattacgcaatattgtttcaatgacaattctggtagtttgtcaggccattcatcttcgcggcaatattagtgaaattgcgcctgaaactgctaaattttaccatgcagtacgcgaaatcagttctcctttgatcactgatcgtgcgttggatgaagatataatccgcattgcggatgcaattattaatgatcaacttcctctgccagaaatcatgctggaagaataaaaagaaaatcactgaaagtttttcaatcatctcttgactaaaaatacagaatcccatttatacccaatagatttcaagatagatcgcggcggcaaaggagcgaatccccgggagcatagcaaactatgtgaccggggtgagtgagtgcagccaacaaagaggcaacttgaaagataacgggtatactgatggtagaaacagtacgagtacacaagaggttttgtatgatcatttttgtgacaggagcaacttcaggttttggtgaatcaattgccagaaaattcattcaaaacggagctaaagttattgcgactggacgccgtaaagaacggttagaaaaattaaaagctgagctgggtgataacttttactttgttcaacttgatgtcactgatcgggccgctatcaaccaggttgtagagcaattacccgaatcactccgccatatcgatattttagtcaataatgccggtttagcgcttggattagaacccgctcatctggctaatttggatgactgggaaataatgattgataccaatgtcaaagggctcgtcaatatgacccgtgctctactgcctgaaatggtaaaaagaaatcatgggcatattattaatatcggttctaccgctgcaagctggccatattccggtgggaatgtttatggcgcaactaaagccttcgtcaaacagtttagtttgggcttacgagccgatttgcagggaaaaaatatccgagtcactgatatagaacccggcttagtgagtggcactgagttttctttagtacgttttaaaggcgacaatgataaagtgaataaaacctacgatggcacgcaagcattaaccgccgaagatgtcactgaagctgttttttgggtcgctaatttacctgctcatgtcaacattaatacattagaaatgatgccagtttgccagtcatttgccgggcttaatgtgcacagaaatgaataattacactcttcttgataatttgttgaacatcttaatgctatcttataatttatctatctgatagtttcttattgtgccatctaaattggctccactcacgctactctcaagagaattcaagaggataaaagatgaatatttgtaattctttgatattaaaagccatgccagctatcgctctggcaataccattgttatggcaaacgccagcattggcggcaacttgtacttctggaagtacctgcgtcacagtgaatggcaacggagattctgtgctcgataaagaagccgctcgtcaaagcaaagaacaatggaatgaaacaaagaatcttcgcactaaagttaataaacgtgccgagaaagagttcgacaagttcgataaagccattgatgctcgtgatacatgtatgaaaagtaccaatatcaatgcttattgggaacccaataccgaacgttgtttagacagcaatacaggtatgcccatcagaccgtaatataaggtgatgataatgaagatgaagaaagcgcttttatttagcgcactgctctttaccctacctccatttgcacttgctgcacaagcttcatgcgaaagcgtgaaagaacaaattgcgcagaaaattatcaataatggtgtgccggaatctggctttacattggaaattgttgctaatgaccacattgaacaagccggtggtaaaatcgttgggtattgtgaaaataataccaaaaagattatgtatatccggcaaggaagccaatcttccaagtaaacccacattctctttctgaaggaaaatacacaaaattcagagaaaatattacgccaatattttaccgttgatgaatgatgggatgaatagaggtcgaggctatacgccttcggccccttttcacattatctctatgtgaacagcggccatccttgacaagctgacctgaatgctagccttaatatcgcttcctatgtaaaccattagcttttttaaaactgacaatttaaataattaaatttaacattataacgttttggaatataaatattttctgaatatcatcatattgaaaatttaaaataggaaacgttatgggtgatcttatcactaagaaaattcgctttgccgtggtattttttatagcattagttgtatcaggatgtagcgctttcgcagaaaatcaaacagaagaccagaattttaatggcaacaacaatgcgcaatatgtaaaaatttatttgcataataatacatcacattcattagtggctgaaaaaacagacttactttggggaagttggattgaaaaaccatcgtcatcaatatccgcatatagtcacgattcatttgcctcaaaaggtaagatttttagtggcaccgagggcaaaattatttatcgtttacccaatggtgaagataagttaaatgttcactggaacctttcatattggggtgtacagaaccacaatatccatctctccgaggcatcaactcattataaacttgagaaaacagttaaaagctcatcttctttaggcatacagattgatatttatctcactgaaaaaaatataggcagcaattataaaattgccgtgatgtcagatcctcagccgtggcgtttagatcctgaacagggcgatcctaatgccgacaaaaaaccgtgggaagaattaaataaaaaggtagcaaatagtatcaataatatttatgaccgcaatcatcttgcttttggcattgttaatggtgatcttaccgagtttggacgcgctagtaccagaaaaagccttgaggagatatatacatcaaaaatcaaattcccgctatttatgggattaggaaatcatgattatgcaaataatgttaatgattgtacttatccagaaggttttgatttcagtcgtaatgcctgcgccagatctgctgtctttgatatggcagagagaataagtgattatagtaaagaattgaataatttctcctatgactatgataatgaagcatggaaaggcagtttatcttattcctgggatttcggggatattcattatgttcaattgcaaaactatcctacctataatgtcaatttggaccactatgtcagcccaaccgtttatattacaaaatcccttgattggttggaaagcgatcttgaatctgctcagacaagaggaaaagctgtagttttaaattttcacgatgggtatgaccattttattaataacagcagttatgctgaaaaagaaaaatttaagtcgctgattaaaaaatacaacgttatggctgttttcgttgggcattcacatttccttaaagaatacaccgcctcgatatttggaaatgcaagagtctatgacagtggagcactatttaaaggtgatttctttatcattgatgttaacaaaaaatgcatgcaaatatctgcatataatggaatagacggtactccaaagtttgttaaaaaaatgaccactgtttgtggtaaatagagatacatcgtactgatattttagattgataaaaaacctcactttctacaagtgaggttttcttattgattgcttatagatcacaatcacgatatttatgtatatacccgtcatctttcaagatgccgtttttagcacctgaaaatggtcgttaattccagacatcagcgagtccgctatatcaggtagcgttgtggtgaaaaatttgaagactttgtctcgaaattcatgtttatcagcgaaataacggttatttcgaacaggttcattcataaccttccataatcgttctatcgggtttaaattttggctatatgaaggaaggtaatgtcactcaatgttgctaacataagcctactcctccacaagatgagctttgttgtcacccgcaccatccacaataagatgaattttttaatattttccatttattaaccatcctgaattcgatgataggaatatttttgatattacgtcacaaatatcacccgctaaaacaccattatctcaagaggagatacaagctcatattgctgccggcaataaaagaagaaataaaaaaagcaaataatcttattattagggagtagcataggatgctcccctgataacattgctgataaaagatcacaggaaacaatgtacttgattagaaaaccgaactctttaataaatttacccgctcttaattaataaaaccgacaaagaaaaaaataacttgcataaaataacttattttggtagctataattgagaatactaatgtcaacaatgagggcaaactgaatgactaaattcatccttacgctgtctattatccttggtcttacagggtgtgtttcgcagaaacaaccactttctcttgattacatcgcaggtaatgaaacatttcatttatccaaaccttgtatagaacaagctcttcctgtaggagaagtcggtgatgatttagctgtgaatgccaataacatttttattaaggttaaaaaaggactgaattgtagtgaccggttcaaactttttttagcaagaaacttagggaaagagttgtttatttactttgacggtaagccagtcataaaaaccagacttgtttctatgattcatccagaagaaggcttccatcaagcagtagaatcgaaatcattgtcagatggaattcttagatccttgaattaatgaaaagcctatggttgctactcttgtgtttcatttatccatcaaaaaaagcaaaccataggctcaactttaagcgttgtaaatgatcctaatgacttgacctatagagtaacttttaaacctaatacgatccgtaccagcaccattattatccgtaatttgatgtgatccaggtcccgttgtacttattcgtttcactccagtcgatacgggatattcaatttcaacaccaaaagctgatggggccgatgagtcggtatctcacggtttataaaaaacacaaaataattagacagaaaattaactaaattctaattaatataaaattataactcattatagtaatattttatgtagattaatgagttattaaatgatatatatccaaaatggaggaaggtaatgatctccatttcggataaaatcaagcatcttcaatgattacgggtatatttatgtatattggctctctataccaacttcactctcacttcccccaacttgtttaaatatagtggcgacatccaggtagcaggataaatctttttcttctggacgtaaaatataaggaatttcacctaactgtggtgcattaatgtgacggcgtaacctatccatcactttcgtatagtgtgataaaccaggattaattctgttagctacccatcctactaattgcaatccatcatttattattgcctgtgcggttaaaattgagtgatttacacagccaggctgaataccaacaactaaaatgacagggattttttcctgaatcacccaatcaaaataaaaagtttcatcatccaataatacgcgccaaccaccgttaccttcaataataacgcgatctgctttattactaagattatttaatccttttttcatctgttcgaaatcaacctgattgccttcacaatagctgtttttccagataacagggttaatttcttcatatttaagcggaacaggagaagatttttgtagaatcacaccatctcgattacgcataccttcttctgtttcatacccttctgtggctataggtttataccctactgccgttgctccatcacgattaaaagcttgtaataatgcacgggtaacaattgttttacctatgttggtatctgtccccgtaacaaataggcgcgttaacataaattctgttttccataatgacagataaaacccggttaatgagcgcttaagtctagaggatgcaacgataagggagattgcgttagctcaatgttttgtttaattgctacaccaatttcgtaaaaaaaatttatataaagttaatattacaaccagaaaacctcttatcctttcattaaactgatcaacaatgaaccatcatataaagcttttttaactgatgctaccgtggataatgtacctgaattattgaattttgttggaactaattcaatctgtttgctataggcaggcaaagcgtgttgttgaatacattcactgatcaccggatacaaaacttgttgtgaagcattaagaggagaacccatcaaaattttttctgggttaaataaattgaccataattgcaataatatgcccaatttttactccaatatcacgaataatatcgactgccagagtatcaccgttattaaccgcctgacagaatgactcaacggtcagtggttcaccgtttagtaaagaatcgggtaccattgccaactgccgtttggctctggataaaatatggctgatacctacaaccgtttccagacacccaaaattcccacaataacagcgttcaccattaggttcagcctgaatatgccctacctccatgacaccacggttgccagcatgcaatgtttgccccgcaataatcacgccaacaccaacatgttcatcaatgaccatttggataacattctgacaattttttgctgtgccatataatgattcagctatcgtccaggcggttatttcatgttgaagaaataccggtaatccggtgcgacgatgcagatattctcctattggcaattcctgaacctggtaataagggaaactgtgaattaaaccttgagtcggatcaacaatcgcatttaccgtcatgctaattgccgtcagacgctcaagacgagattgatagcgaccaaaaaatgcatcaatctcatcaataatgctatctaaaaaggatttttccttgttggccggtaatggtaaaacatcttcaacaattaacgtgctacttaaatcacgcagtcccaatattaaacttcccaagttaatactgacacacaggaaatgccaactttcagaatcaagctttagtccggtcgccgggcgccctctaaatcctaaatccaaaaattccgtttccatgactaagtgtgcatcaaccaattcacggacaatcttagtaatactggctggagcaagttgcgcttttttggacagctcaatacgggaaattggaccatattgatcaattaaccgataaacagtaccaatattaatctgtttaatctgatcaatatgccctggttgtccatccattatttaccttcgttatactctaattaattcacgtttcaaaataattgttagctgattatgtcgaggttttaggtaaaaagtatgattcttgcaataaatatgtgatattcagcacgaaatttaacttaattctacttattttttccatgcaaaatattagatatgagtaggtttatcagcctgtctgcggcggccgatattggccggtttttgtgatttaccaaccagacctcagaacaagagtggttatcaactaatgaaatatactggacaccatccactttcattcgggtaaaagattcagtcacaacactgacgcctaatccagcagaaactagcccaagaatagtcatcgcttcgccggcttcctgtgaaatcatcggtgttatacctgcttgagcaagtaatgtgatgatttcatcatataaagctgtccctacttcgcgctcaaaaaacaccatcggatagcccgataacatttcgagctttattccctgtggagcatattccaacaaaggatgtccatcataaacagcaagcataaaaggttcccgaaataatagccgatactcaaggttatcgggtaattgagtattgcgcatgatgccaacgtcaatccgtccagtcagcaatggcgcaatctgctgtttagtattcatctgatgcatatgaatagcgacttccgggtaacgttcccgaaattgccgtaaactcagagtgaccttattcataaacggtatcgtagaggtgaaaccgatagatatttcgcctaattcccctttttgcattcttgctgcttttgctgcagcagcatcaacttgggccaggatctgataagcttctttcagaaacatgttacctgccggcgtcaagctcacattccggttattacgctctaacaaccgcgcatttatactattttcaagtgattgaatctgttggcttaatggcggctgtgaaatattaagccgttctgccgcacgaccaaaatgtaattcctctgccactgcaataaagtagcgtaaatgccgtaattcgatagccataatcacctttgagatctaatacatattattattaatgattaatatattagacaaaatattttgcaattcatatgcttgatcttcataaaaatacaaactagctaatgtgttaagtaaggaaattatgtgagcgccagccctggtagtaataatcgcagtatcaatgaaaatctgactcttggtaatcatcttgtccaaaatgctcaaaataagaaaaatcatattcagaaggacgatcctctgtatgttaaagtgacattgtcactctttaccgtagggttagctgcatttgccctactctatttcgttcaacccatcttacccatgctgtcggatgattttggtgtttctcctgctaccagtagcttatctttatccctttcaaccggaatgctggcattgggcttattaatcaccggtcctctgtctgatgctatcggccgtaaaaatgtgatggtaacagcgctattcgccgctgcacttttcactttactcagtgcatttatcaccagttggcatggaattctgattgtacgcgctctggttggcttgtctctcagtggcgtagccgccgttgcaatgacttaccttagtgaggaaatccatcctaactttgttgctttatcaatgggactttatgtgagtggtaattctattggtggcatgagtgggcgattaatatcaggcattatcactgattatttctcatggcgggtttctgtcatcgtattaggtttattggcattaattgcggcaatgatgttttggcgtatgttacctgaatcgcgccattttcggccaagttctctcaaacctcactctttattaatcaatctgaaattacattttcgtgataaaggattgccattactgttttgtgaagcctttttacttatgggcggctttgttaccctatttaattacataagttatcgtttattagattcaccctatcactttaatcagtcaattgtcggtatgttgtctattgtttatttggcaggaacatacggcgcatccaaagtaggtccattaacccatcaatatggactcggaaaagtgctgatcgcgacgataagtatgatgctaatcggtacgcttattaccttattctcatctgcggtgatgattatcattgggatgatagtcctcactttcggtttctttgccgcacatgcagttgccagcggttgggtcggacgtcgtgctcgccgggccaaagcacaagcgtcttccctttatctgttttgttattacttgggttcaagtgtagcaggcacttttggcggtatattttggctccaattaggttggaatggtgttgttttatttattaccattcttatccttttggctctactcttagggtttaaactcgccaaacttccagaggcaagataatagaagacaagcattattttatccgccaggtaatgtccttcactttctgatttgtcaaaaattaatgtgtttttttgccgcgatattaaaaatcgtgacaacattgttcaacaaaaaaacaaacattaatactcatatataaggaagagttaattatgggaaattccagatttgaaggtttcactaaagaggaaataaaattggcatatgaatttgatatgctaaatcaatctatggtgatggcagaagcgaatgcctatgcgttgcaaaagcagttatatcgccttagccaaccacaaaaactgctaaataaaataggtcggaatgcactggtagagattaaagatacgatgatacgttcagtgcctgcttcaatatgtgcagggttggcaggtactgctacagcatcaggtggccccgcgatctcttttctcgccagtgcggcagcgggaagtattggtggagaattggcaaaacctattacgtcaagaaccggtgttcatactcagttgtatccgacctgtaccggtaatacgattaaagacattgagcaagaggtacagggaaaattacagggaaaattgagtggttaccccaagctacatgaactataccgtacctatatcaacaaagaatatgcgcgggattttgtgcttgataccgcactggcaaatacacctgatgtggttaccagtgttataacagaaggtgtcaataactggacggcgggtactttcagttccatgctgaaatatggcccaatacctattgtggctttaactgcggcggcgggattagatcctcgtggtatttataataaaggcaaagatacatttcatgctatggctagcataaaacctggcccacacgcagggggtaatctgaaagcgaaaaaactggaaaaattactatgtacttatcaagaatatttaccctatctggagcaaaatttatttcgtgcacgagattgcttaacgaaattgattaaattgctgaacagcaatctggatagaaaattaaatgttgaagcattcatgaaaaaatcccctaatcttgtcttatcatataagaacgctcacatggcatctcaagaaattatcaatatgcttgagttattgattatgctggaaaaagaaagagaaaatcaggtagttagggaaacctgtttataaaattaatcctcttttaggtacgttaacgcaaaccaagtgacctaagagagggttttaatcaaggtggtgtacttgacggtatctaaagcaattaccaaccctcttggtatatacccgtcatctttcaagttgcctctttgttggctgcactcactcaccccggtcacatagttctctatgctcccggggattcgctcccttgccgccgcgatgcatcttgaaatccattgggtatatttacttggctcaatagccccaaccttgtttattatctctttttcacagtataatgccataatcggattaccgctaatactccacgatcaaaattacttcacattcatcacactgttagaaaaaataataaaatcccgagatttattcaggtaaatgcaaaatattcacctactgaaaaattattatcagcactgatatcaatattaaaataatatacagcaagattattctcatatgaaaataaacaggaactcggacaacaagaatacgctagattaataccttaaaaaccttttgggattttagctcgatatttctgcctacattgaaaaaaaatttccaacaacttttactcacctgttgcatgtaacgtttttttttggttatattatagacatcgttacatgtcacgagggtgaagtatgtttaaagaggagtgtcggcgtcaaagccatctggctatggcaacacaggataaggaaaccgatacactattagaaaatgcgataaatgaactagctgattcagcagactgggagtgaaatgggagaaaaaaatcatcatcacataacttcttgcaaaatagttttaaattcaattttcgacttctcataaaaggcgacacagacgtcgccccctagttattatttcgttcagcccgcagaatctttatattgtcaaacggcctcgtaacacattacgggtgttaatggacgattgactaaatagatttccggtactatttcgaaatgcttggttcacttcaacggctcgaatagaaggatgaacatttatcgcttctggctccgattgggtaaaacgagataaagtataggcttcacttccctcagaagtacctgctgatgagctgagttcccaagtatgatgattcactgcataagctgtacgtgcaagattaattagccccgccgttgttgatacagccccaaaacctaaagagacccatcccaagatattagccgcattagcattgttatctgcaacagcagaagccgctatccccgtagagagcgccacagcattcgcactcaatgatatcgtggataaagcgatatcccagcgtctgctagaacggctggcaatttcaccaaattcaataggtactgacccgataacactcgtgctggctacctgagaaccactccgtgccgattttatcagcgaagaggtaaaggttattgcgctgataccaaagcttaaaacccccaacccggtactaatccaatttaatatcccggctgttttcggatctttttctgataatgctgctgacgcaatccctattgaatcagcagctaatccaatgacggtcgcagtaactgcaaacgcactggtagaagcaatcgcccccaaagctccgcccgcagcaatgagacccgcactaattgccgctcctgcccccagtgacacaaccccaacaatgataccaattgcccccagcacaatacctaatatcccgccagcactaagatgaccgttcagatcaatccggttgataggatcgccttggcaataagtgtagggattaacccctccccggccaaaggggctccaactgtcgggactatgaaatctcatgagaaccggattgaaaacacgatatccgttacctaagaagtaccaacctgtgactggatcgacctgcgctccattcaaacccggtaatgaagaaattaaactcctaaagccataaggtgtgtaggataaagccatcaactcgttttcgttctgactggctataaccgtactattatggtcagtaccgtattgatagtagactgactcgccattcttggtgctctgatgaccaagccgttgtttatcactgctcagccaggtaatggtttcatcacccaattgaacattcgccacattgcctgaagcataatattgacgattaaccgtaccattcgctaaaacttgtgcggttaatttgttcaatgcatcatactgatattggcataccaaattacccttactgtctttgacctgtaccaagcgattattctgatcgtaaataagcgtttgccctttttcgtcgcgtgttagattaccgttagcatcataacttaactctatttgctgtttatcactggtaatacgaataagttgggttggatcggcttgactgaaatgataatccactgtttctttaccatctcgatatgtattatcaagccgtttgatattaccccattggtcataatggtaaatttgctgacttaacacacgaccagtatgatcaaccggagattgttctccctcgcattggtactggcttaagcgctgattactatcatattgataacgttcatttttcataaccaccccatcaatggaggtgatgcgttgactgatttgattattctttgtatagcttaaggtaatgacttgtattgagaagtcactaattagcgagcgttttatctctcgatcaaaaacatcgtattcaatttttgtggctaattgggataatgacgttgtgtcttttgtcgtcgttgttattaaccgtccaacattgtcatattcaaatgtagcgtattgcgaactctgttctgttttaactaatcttccttcggcatcgtagctataaacatgatcatgagcaaaactatctttatgacgttgaatcaaaccagacatcgtataacggtaatcgcccgatgaaatcggtttattatcccgcgaaaatgattcgtgctgtaatacacccgatggaaaataactgtaattgctctgggatacaccttctgtcgcagataataatgcccccgttttctgatagtaactaaagttttgttggcttgtctctgtggtaaatttggacatcacactaccgagagcgtaaagataatcgatgttttgtttattatgcgcaggcgtgacagactgaataggtttatcaccttgagatccatataaatattccgttttgcggccacccaccgtatcgcgggttacccgcccaagaccatcataaactaatgaacccaattgtgttccattcacattcagtgcagaaattaattcttcatggctaaagcttgcataagcggattctaatattgttctgtctggcaacgtttttttcactatacgatcaaatagatcgtactcaatttgggtagcgtaaccctctgcatctgtttcagtcaccgtacgaccaaatccatcataacgataggtacgagtgctatatatcgcaccatcaggatacacaactttaattgaagcaggctgttcaaagttattttgctgaatatttaacatccccaaccctttgaccccttgagtaattgtcctcgtaataggatcatggatttccagctctatccgaccatcactgtactcagtactgtaacgatttccccaaccatcatattgataggttttcgttgtcaccaaaggcgtcgtcaagcgagtcaaaggattagcagataaatcccataaccaatcatttgaaatctctttgaccaattgccccaaaacatcatattgtctggcaagaacttttcgatatgtgccttgataaatccccgatgttccccaaacaccatcatcatcttgttcttcaatcgagcaaatacgccccattccatcgtaatgggttttacgtctgatgccttgagaatcaatttctatcatcaccggccaaaaatcattttcgtcaccaccaggatattgatatatatagctacgtttaatttcttttgtcgtgccggggtcaataatttgtcctataattcggccagaaagatcataagactggtccgtaatgacatggtttacatcaactttacggagttgccgatgtgtataaatggaggtcacatttttcgattccatatgtgtaccatcaaaacccgtcaccgtagagtttgtagtcatctcactatctgaatattcatatttaaatgtggtaaccgtttgttggttattcatcaccgacgttatttttgctaatgaaccatgagatttgtttgtcggtgaattaacatagttaaaggtcctcactattttactgtctatcgtctctgaggctttactgacatattccttaacataagcgccggtaaaagtgggcagtttttgatacgtgtaggaagtcactctatttgcgacactttgagcagcatcaggtgatcctttttgcgtaactgactttaaaaatcgggaaaaacccaatggatcggcagggcaattattaccttcaccattcaccggataataaacgtattctttctgtatcccactggtctcagtaataagtagagtatttccccaatcatcgcttttaatattaacactctcttctcgtgaagtattggtctgtaagtctgtgtaacgtgttaacacatgagagggttgttgtaaattttctggttgttcggaaaagctttttgacggatcttcattataagtaatttctgttatgatcctcttattatcttgtgtttttgcttctttggtcattaaatgaaatttatcaaacactctttctgttactgaaataacattttgaccgtttaaaacacgttcaatggatgaataggtatatttccctgtaaccagatataaattatcttgactggaatcaaagcttgtccgaccagaagaatagcccaagaaattatgtactgaactatattcataggatttgctgatcgcaggctgcccattaccaggttgaatagtcaatgcagcagcataaggaatagattccgtgtctgtaactttatgcccattctctttataacttaccagctcaacataacctgttggtgtacgaaaagcgctaataaccggaaatattccttttaatgtctgataagtcatcttaaatctggcagaatcaataggaccagaagcatcataaggtacagtcacagtaatgaggtaatcattgcgataatcgaatgcgattttcgcagagatattattatcatctgggtattcaactgatgtgcaattatttccagagtaattgagtttaagataagttttacccgtcatacggtattttatttcggataatgcaaatcttgaattataaattaaatcaaatacttcaccatcaggaaattcaagtgcaaccgttttcgcaatatcacttgatccaattcgtttaagtgtctctataatgccatttttgttataaacataaaaggtattactatcgagtttatatacacgcaaatcttttaattttttatctttaaagctaatatcattattattaggtggcaatggcttacatttaaattgctctccatttgagcggctaaatgtaagtgtttttacatctaacattgttaatgaaaatcgccagccaataccaaatccattatttaatgttgttaatggcgagaatgataaattaagtacctgttcaatattgccgacattatttggtctcaacgtgataatattgatatttgcgctatattgacctgttctgggatcgacaccagtattaatataagatccaaaattaaatgcattggaatatatatcgttaactttcattttaaagttcccgtttgattaatatcacagccaaattaaatatctatttagccattcttttatatacaataatagaacatcttaattgctggtaaacgcacatgcgattaccagcatagataaagattttttactaaggaaaatcaacttattctcgctatgcttagcgcacgcccaatattaaccgaggatattctaaatttatgctggcaaccgtagttatcaatgattgtgacatcatgatatccatcgacataaccggtggtccatgaacatcctgttacatggagtacctcagcagcaagctgtgtgtcaggaacagttacatcataagagtagtccataacacatcctccactcatatcatttctagcatttacatatgaagttcctcgtttaaatactcttgctcttgtcaagaatctatcatctgatgaacttttaccaaggacatatatattattaacagtcctgtcattcccttcaagaatcctcaaatgatatggcaatgtccagcgataaaggttaattgtttgatgatgggtatccgatttcgttggttcttctgttttatcaaacaatatattggtactttcatgcaattgatttgcattaattgcataaggagcaatggcttttaataaaattttgctgtcaaaaacttcatcaccaaccgacatattcgttgttagtgtgcgcttcccattcgtatcttcgaatgtcatttttgccattaggtattctgtacttgtcctattactactaacataacaatagataatttcaggaacactcttcacactgttctgatagttttcatttgtacaacaatctcccgcacgatttattaccggctcctcagtaaaaatatcagcactataaacaccatttaataacccaagatcatatttatttctcgcatctgtcgttgtccatcctgaaggcatttttaattggtcatatatgaggctatcactcaatgcagccacctgaatcgatcttttttcagcatcactaagtgctaattttacccaatcaccattcttatattcttgtttaagtacagagatttttaccatacattgatgacgcccattagcataaaaattgtcatcagttttttcgatggtaaatgttgttattttcttttccatcacactctccataatattgtgaattaagctataatagaaagaatatcaagttcaaagccataatatggcccttgcaattcggtaataattctgactcgataacgttttgataaatcgtcttcaaattccttcaaggcgttcatgataaattcgctgtattttccttgtgcaaaaaagataaattgcgtggttgaaggattaatagaaacatatttacccaacgcatggcgtagcgtcttaataaatagtgaaccatcttcatttaattcgaataattttctatctgtcgtcgtcctatccataaaattgccttcacctaaaagataaatatttatctcacgatggtctcgacgcagtaaaaactgtttgttgatatccaattcgaatattcttggcttaatagttttatcaagtaaatgatctggaataacaaattcaatcaagaaacgacgcccattcacgataataggcaaatgttctcgatcaattgagaaacagcacaaatttccaacccatgaagagccttctgtttccgaatatgctgaatataaagcagcaaccttaccttgttctagaatgttcattataacctcttaatattaatggtgaaaaaacagcattaaatcaaaagtcaacttacagttttgattttacataattagtgagctcatctaatgttgaaatagaatgatctgaaaaaagctcagctttaagcataatgccatacgtttccaatacaaatacttgaatttccacatagtcaaggctgtcaaatttaagtgaaataaaataagattctggtgttatctcttcctcttcgatatccttcatcattaatattctattttttattgcagtaaaaatatcactttgtgttggcatttcgctttccttttatttcatcttagagataattgaaatctttgatacaaaaatagggtttttatcatataaacatcggtaataaaaaatacggatataatctttagggccattcttaatcagtaaaggtggatttaattcaacacaaatatttggagaagatcgtaatattgtactattaacaatgtcctccttgatcttaatcgcttgtccggtatgcaaagtaaaagattgattcagataatcctgtaactggttaaaatagtagtgttcaaaattaagaaaacttgtcgaattaatgacaagatgaaaaacaagcgcatccagaaaccatccaatagatgtgacactggggaaataatgtctaaagacagcatatttttcacaaacgccttcccttgttatcgtcaatttttggcagttatcttgaacaatccaatgttcaattgactccattgtattttctacactggtattgccggataacacactttttccgcacggattttccaatttaaacgttttgcttttagtatcaattctcaactgatgtggtaatgcagtataaacatattgacggaatgacgtatcaatattcagtattccagatgtaaaagcggaagttaattgagataactgttgcctgacataaagcagactcaacattccctgcacggggtactgctgcatattgtgcaaaaattcacttttctccgaataatggataggattaaaatccccagagaaattcgaccaatgttcaatatcttccatttcaaaaatcaacatatcagttaccttaccttagagataaccaacgcagcattatgtcccccaaaacctgcactgatattaagcaccacttctggttgaacggtgtagcaatgttgattaggtaaataattaaggtcgcaatctggatcagcccgatgtaaattcaatgttgctggcaagcaattttcagttaatgcctttacacagacaatagtttcgaaactaccggcggcagcaatcagatgaccggtataagattttgtgcttgatataggtacctgataagcatattggcctagtgctgctttaattgcctgagtttcataaagatcatttaacggtgtcgaagtaccatgagcattaatatagtcaatatcttccagcgaaatctgcgcctgctcgatggctttggttatcgataatattttaggttcaatatcttctgtcggccgggttaaattagcggcgtctgaatattgagcgtaacctttgatttcggccagaatcgttgccccacgcgcgacggctgaatcataatcttccagacaaaccaccgccgctccttcggccaatacaaatccagagcgatcaagactaaatgggcagcatgcgagattggggtccgtttgctctttcgacaatgcattcagtacatcaatactccaaatattacattctcgaataagtgattcagcagccccggcaatcatacattttgcccgccctgagcgaataatttcaaaggcatcacctatcgccattgtacccgttgcgcaagcagccataatggtattctgataaccacgtagtccatacatgatcgaacacgccgccgtcatggaacttggcatggtgataagattactcatgggatgagctaatttaacttccttatactggcaggcatgatctccggcattatcgacagctccccagccactaccaagtatgatcccacattcgtatttatcgtaatattcaacaggtgatacgttcacgccaaatgcttgggtaaaagcttgataagtcgctttcaacgccatttttccgcagtcagaaagcatatgagtcaacttttttggtaataactgataacgtgatggattgggtgcaaggaaagaaaagaaacgtgaattaatgaatgagttaggaaattcaattctgcgaaattgatgttgtttctcgataatactttgccaacatgattcaatatcttcaccaattggtgttacggtgcccatacctgtaataacaactctttgagttctctgcatattggttaccatttatacatagattgataatgtcaatttttctagctataaaataggctaatgaagacatatcaccataatcataaataagtattttcaatactcctggctaatataatcgttatttgtgaattacgtaaaactaactgatagattattttacccatgtaataaaaccgatgataaatatccataaacaaatatattattattttaatatcattatattcagcctacaaaataattgattacaccatattagactgtattatcatggtaaatcctaaaaatttatttaccattaactcattattctgtttaataaagcacatcattgtatataccctatggatttcaagatgcatcgcggcggcaagggagcgaatccccgggagcatagcaaactatgtgacgggggtgagtgagtgcagccaacaaagaggcaacttgaaagatgacggatataaaaacaaaatataaataatgactttaattattgcgcagttgtttatttcataacatatgaattcaatgattatattaataatctaacaatgtaattaaagaaaagagaaatagtaaatatttcacatcattcctgtgaataagtactgaggtacattgcccaatctttctctacatcaaatctgcatcaaaacatataccctgtccccttgtttgtaatatactgcccataactggataaatacacagcactgtgcatcttcattgtccagttaatgtaataacaccggagacaacatataccctatagatttcaagatggatcgcgacggcaagggagagaatccccgggagcatagataactatgtgactggggtgagcgagtgcagccaacaaagaggcaacttgaaagataacggatatatacccaatggatttcaagatgcatcgcgacggcaagggagtgaatccccgggagcataggtaactatgtgaccggggtgagcgagtgcagccaacaaagaggcaacttgaaagataacgggtatatggctgaaacaggcaaggatacaggagtgttcagtggtaacaaaatctgaggcaagccctgactcagtgataaagcagcagttcgataccctcaccgtcgataaaaagggtactcccaaagagtcgcttacacgttgtggcgaacctccacaatcagcaaagactcacttagcttatcgataagcttgctgaatacctgacgagattgaagatctaaattagcatcccactcatctaacatcaggatctctatcttatccactgctttaacagagatttccttaagaaattcccgcagttcctgcccagtcgacagattcctttcattagttttttcaaaaacaagttcatgatgtgccggaaggtaataagccgattcacccaattgctccttgagccagcaaagaaaagtagacttacccactccattcggccccctaattgtgattcggccagacgacgggactggcttaataataagttcttttaaacttgccaagtctggcaaagtgccatgagtttcgtatttcaaacgattccattggattcgttcctccaaattctgcgatgtctttggagtttctgcagcctgtcctagccccttgagcctcgcactcaatgccgaccaactcgtagaatagaaaatcacgacatacgcgtgctgaagaataagaacctggcgaggtaaggttgcaactagaaccgtgagaacagaaggattgtccatattctccaagaagagaacacttgtccagacaagtaccggtgccatcattagtagcattcccaacgctgaagcaagattattccagtattggctacggacggctgttcctaaagccaaactctgtcggactttcagttcactttgataaagagactggttgtatttattgcccaataggaaattgtcccacgccaaagataaaacacgttgaagggctgttctggcagattgtgcttctgcgccctttacatgaattctttttctaaagaaaaaaatgacgctcgaaacaaaggcaagaccaacaaggtaggaccatgcaatcgacgtatcaaggacaagagaaagagcaagtacattcaatgaaacatttagaacaacagaggcccaatcaaagataaatttggaactttcattaaaaaccagaaacccttctgaggacacatagggcaaatgatagtctttaaactctttactcgttcgaatagaagcccgattccagaaattaagacgaaacctttctacatatttttcaagtgcaagaaacttagacttctcaagaaaaaccgcagctaagctagaaggaatatagacgagtgtaagagaaagtataaaaaggacaagatacagagtaaaattctcattagcacttacctgttttgccagccccgctatccaataagtagaggaagccacaatcaactgttggacaataagaaaaagcaaagcaaaagcaaatgctttattaattaaaaattcaatagccgacttttttacttccatcttaatcttatttttctttcagtagatacaaacttcaattgtccactggaaattcctctgggaattcctgcataactgtgaagccaatgcgtcttaggttcgaatacgtaattacttaacttaactccgtctgcaagctcagcctcaaaataaaaatggatagcatttgcacgttgagacgccttgcattcgacggaatactctatatctgagctcttatccagtccaagattaaatcggcgaataagttttggttcagagcagacttccactccatctgatttgataattttttttctaattaaattgcagaataaacattcaaacccggacactagttctgccgggacaggaccaaatcgagaggcgtaactactcaataaaagatcaaaatcagcgttcagttcaggcaagtgtataaattgatatttaagactcactttagaaggaatcagcactttgatacttgagtgtctagtacaaaaatcgtggcagatctcaacaataccctcgtcgattccaaaataacccaaggtttctgtcacaagaacatccggcggattcttcaactggacatcaaaagattttttgctaatgtactggatattttttcttaagcccctattgagtatttgagcaacaatactactagcttccaacatgtctatataagtaactaatccattagttttctgagctaacatctgagttagaactccagttcctccccccaaatcaactacatgagaatcctcttgaacaatcctatcgattgcagttttgaagcagttcaaacgatgttcatcagcaagcattctcgaatggtacaaaagcggaaatgcttccatagagccttttatttcaaccattatgcaagcttcttctctcgtcctaccatcagatcaagatacccctgacacttctgcataattgactggcctctttccgtgattaaatccttataattaggaagatcggccaaagaatttaatgcttccagcgcctgtataagcatcttatccgatggcggatgaacgtggcatttttctggttctccgagatagtttcgtctcaccaaaagaacttctacagctacgacgatactatgaaagactttatcgatagggcgcttaatgttgagtattgctgattttgcaaaattggcttcattctggagaagcttgtagtcatggaagtgcaaatatcggagttcgtctataaaaactaaattatgagtaagttcatggaccaataattccgtgagatcttgtacgtgccagtgtttacggctgttgatccaaatcacacccacagcattcgaggtggaaccgccccctgaattctttgagtctctcagaaataaactatctatcgccatctgaaatacagcgtatatctgtggcatccttagcttcaattcttctaatgcagctaacaaaaactccagtcgttgcttacgaacatcgtcttttagactatcgccaatcagagacgattgatctctatcatttaacaaagcgtctgttcgataaagctctaccagcttgtcttccatttcaggatcctcgactatctgagttcctacactctctaaccgcggaacgttgggttgatagccctttaaaaaattatgaaatccaagctccaattcttcagacgttttgggagccgtttttgattttaatgcactaagaacagctagatttctgtaaacctcgttaataccaatgaggtgtatcacactataccccctttgaaaaaaagaggggatactgtcgaatcaaatcccccctatttataattagaccaaatcatcataagcgatcattcgaacatgaacgaaacagccttcctcattcctcataacttcaacattgtcttgtgcttgtatgaaatcaagttcgtttagatcttctaaaatctgttcaagagtagccatattctttccccctttttaaccgtagttaaaaataaaggtagaagttgatcagagttctgtcaattgagtatttacaaaaaattcatgggacgaagccaagttatagccgtttagttacagttataaacatgtgaatatgcttgaccactactcattcctcttggtagaacaagtcataaacaggaagctctgactattgaatacaaccataggatctggccgaataccattcgcgtacgtctttgttccattaaatttaaaactaaaatcccatttacagaagaaataatatcgggtattgcccaatttgtagtatcaatctgaaaaaacgcgttattactggagaaatcatgatgaaaaaaacaataaaaaacatatccttattcacaggaattgtgcttggaagcttgacattagctcatgcagcaattattccacccggtacacaactggcaaccaaccagaatattgttcgtcataatggctcagaacctgcttctcttgacgtgcataaagttgaaagtgatgttgagtttgatattataaacgacttttttagtggattaattagtataggaaatgatggtaagtttaatcctaatttagcgatccgttgggaaaccaacgataataaaacctgggtatttcatctaagagaaggaataaaatggtctgacggttcacctattaccgctcatgatgtggtttttagttggagacgtttaattgatccccaaatggcatccccgtatggcagttatattgaaaacatgtatatagtaaatgccaaagatattcttgctggtaagaaaaaagccaatgaattaggtgtaaaagcattggataatttaacggtagaagtaacattagagcaaccgctatcctattttttaaatatgctggcacacccagttatggttcctatcagccaaaaagcggttgagaagtatggtgaaaaatggactcaaccaaatgtgtttgtcagtagtggcccattcaaactctctgaatggatcgtcaatgagaaggtgattggcatcaggaatccacaatattgggataataaacacaccgtaattaataaagtcacctatcttaacgtcacatcagaaacagcggtggtaaaccgttatttagcaggagaaatagatattacaaagggtattccatcggttttatttaaatcattaaaaaccaagttaggtaatcaagttcatatttcacctaaattaggtgtttattattacgaatttaatacccaaaaagccccttttaacgatattagagtcagacaggcattaaatctggctttagacaaagatatcataacaaataaagtcttagggcaaggccaaaagccagcctataataatactccaccaaatataggcggaatgaacttaaaacagcctgattatgcatcatggacgttggcaaaaagaattgaaaaagcccggcagttattgaatgaagcgggttataacagaaataatccattgaaatttaatcttctttacaatacatcagaggatcataaaaggattgctattgcagtcacctcaatgtggaagaaaaatctaggtgtggatgctgttttacagaatcaagaatggaaaacaatgttagacaccatgcatcaaggtaattttgatttggtaagatacgcatggatagctgattacgataatcctgcttcgtttttaaataattttgtcaccaatagttctaataatacatcattatatcataatgatatttatgatgatctgatcagtaaagccaaagcaacaaacaacatagaatatttccagcaagcacaagatattcttacaaaagatgtcccgtcaattcctatttattactatgttagtgccaaattaataaaaccttatattggcggatattatatcagtccacttggtcttatgtcatcgaaagatctctatgttattaagcattaataagagatgtttgtaagattaaaataaagattacggtttttaaccgtaatctcagaccgctgacaaacctcattgaaaataatggggtctgttcttttcataatgaatcctaatacaacccattttcctcattgacccgattcaatcgcccgtcagggggttagatactgtatttgcattttctgcaacccgcgaaaatgggcgagagcataaaaaactgtggggcatttatgtggcaaggaaaactgcctgttttccgttcagttattgggtgataaataataaatcgctttgcaatttactataatttgctctataaattacagtagtctacattgtgaaatattcagaaattgcgaggtgacaacatggctgaaactattgaccacggcaccctctcacatctagtggaggccggagccgttaaaggagcgcacatcgtaggccagccaggcggctgggccgtgatggtgcgctatggaatgcacgagcgaccactggccgcacagcgcagccgcaatgtgcggctgttccgcaagttcgaaacgctggtttcctaccttaaaaaaattggcattgcccgcttcgacgtggattcatcaaactacgcccccgctccccccaatacctcaacgcgcaggccagatcgtgccgaagcgctcaagcgtacccacgaggctgctgcatatgatgcgtggtttcgtgagcaggtgcagcaagccatagatgaacccggaccgggtatccctcacactgatgtcaaggccaaatttgccgccaaacgtgaagccttgcgtaaacgcattgtacagggtcgcgcatgaaaatcatttggcgaaagatcgcggaagcagatcgagaacgtatctttgattacatcgcacaaaacaaccccagcgccgcgcttgagcttgacgcagactttgatgctaaaatcgaactcgctgcgcagcggcctaaactgtaccgccccggccgtgtgcacggtacccgtgaaatcgtcgtgcggcctaattatgtgattgtctatcgcatcaaggatgaaagcggtacggtagttgtgctgcgcgtgctccatgcggcccagcaatggcccccggccaagtcaagcgagagcgtttctggtgggaaagtctgaggaagagtagcatttgaagaagatgtgacgattaatgctttcgtgaatcaagcgctagaaaatgaagtcagtaaacatcatgtagggccttaatagccccatcggattaatgacaaaagtgctaaccatcgggggccggtctttgatctaatagaggtactggaaaatcgatacctcgatatactaaaagcccccacacgacaacaatatgattgacatcaacagaaccccactttttaaatggggttcgtcagcaatctgagattacggtttttaaccgtaatctttctcagaggctatcaaagtcacgcccactctacgccggacaccacctgcgcaggattagcaagtaatttccgtaaattacgcatttctcttccctgattaatcgcgacagcaccgactaaaacttcattttctgtaccaaataaaatggccttatctgattgcaaatcaccctgaatatgccactcttcagcctgcatgttaccaaccatttggatgttaatgccccattgatcagtccagaaccacggcgcgcctggctgcgggggggccaaccccatcatggcatgcgcggcgatggtcgcctgacggttagcattttcccaagtttcacggcgctgtagatcacctgtcagcggttctctctgaaggcaaacatccccggcagcaaaaatatccggttcagaagtctggcaacggctgtcaatgacgataccgccatcagtcaccaaaccagcatcagcggcaagctgatccctgaattcagcgccgataccataaataataatatctccgatcaccttttcaccggtgttcaatataagcactaattcactcccttgtttttgtgcggaaacaatgttggtatcaaggaagaattgtacccctttttcctgatgacgattcaaaagataatcctgcaataatggaggagcacaacgccccatgatgttatctgcctgttcgataaccgtcacgtttgcccccaattcacaagaggttgccgccagttccaggccaatcacaccaccaccaacaatcaaaatccgtttgtcttttttcaccgcctggcgtaaacgttgcgcatcatccagcgtcctcaaggtataaatattttcacccagctgatcgagcagcggaaatcgtctggctcttgcccccatagtgagcaggagtttgtcatacctgagcttgccgccattttctaaaacaacacaatgtttcgatggcataatctggctaaccaactggcctatgcgcagatctatctgcttttccagataaaaatcttcggagaacaggtatttaggcgcttcctctgggttgattaaatagtcttttgataaaattggccgctcgtaaggcgcatgatattccttaccaattaaaataatatcgccatcaaactgctgctgccttaaggttgcggcagccatagctcccgcttgccctgctccaacgataataaaagtctgattccgcatattatgctcctatctgagtgacaggttgagcactgaccattgccatccctgccagccactccttaataggttggtaataatgccgttgcgctttatattcgccataaacagaaagcgccgcaaaagccgcgatccaacagcgaatttcctgtccacctttcccgccctgaatggcgattccaccctcggttaacgaagcaagacgccgaatatcgccactacaaaaaatacgcaataactcgtcatcccactgtggattcaacggagcaacgatattctcgccacgagccaacgattttccaacctcaattacccggatttgccgtttttgacgcgcttcttttgtcggatttctcccggcaatcaacccttcttcaacttccggcggaacctgtcccatttgtggtatcgggggatcatgtgataagccaccagagcctaacagcaatacccgctgatctgttgtgaataggaattgacccactgcacgacctaactcaacagcacgacggcaggtcggcaatggtttagctgcacagttaataaatattgggatagttggataacgctgtaaattctggcaaagcagcatcaatggctgagtaaagccatgatcgacctgcatacgccaggagtgagccacatcaatccctgaatcatataaggcagaaattaaatccttcgcggtgttttcaggaacattgagtgggcctttaccaatatcccaatcccccactgcattcgctcttactccaacgcaaaatgccggcatgagatcataaaaaaaaccattaaaatggtcgggagcgaaaatcactatcaattgtggatcgtagtcctttatctgttcagccaattgctgaaaaacctgccgaacatgcttttccgtcgcttcaggcggagaaccaaaacccatcaaaggtgtgtgtgaagtacaaatcaatttaacggtcatctgaactctccttcttggtcggagacatcactcccgctgtcgtttggcgaatgccacggatacttaatccggcatcagccgttatcatcacccccgttaaagtgcggttattggcacgggaagccaacatgacatacggaccggtgaaatcttttggctgaggtatgaattgcaaaggtaaaattgcactgagactttctaatgacaggttatctgtaatgcatctatcttgctgagatagtgaagccgccccacgaagatcacttggcatcccacaaggcgcaacaccattaaccctgataactggcgctaattcataagctaactggcggatcatgccgaccgcaccgtgcttgctggcggtatacaacacccctccaccaccagaaaaccatgacgagtttgacaacgtaaaaatcatgctgccttctgatgcggttagcgccggtaacgcggctttagcccctagaatataccctttcaggttaacccccatcagctcatcaaatcctttatcaatctgctctggtgaggcgtcaagcaggctaattttgtgatcccatatcccggcattaccaacaaagcagtctagtttgccaaaacaccgaacagtttcagccactgctcgctcattgtcctcaaaagagacaacatcaccgtgaataacacagatatcgttaccaaaacagtgtgccaaagctgtcgctttttctgccgataactccaaaacgcccactttggcgccttcagcaataaaacgctctattaaagccaaacctaaaccggagccaccgcctgttaataaaatgacttgatctttgatccaactcattattgctcctccgatacagtgatataaatgtttccgtctttaacaacaacaggataggtcttcaatggatctgtagcaggaaggcaaagtgccttcccggttctaagacaaaaactggccgtatgcagtggacactcaactgtcgcattgtcttccaaatacccttcggatatagaggcattaccatgactgcaccggtcatcaacagcaaagaattcgccatcatagtgaaacaacgcaatatccggtgtgtattcaaccttacgcgctcctccgtcgggcaattcttcaacagtacatacgaataattgactcatcagaataagacactcaagttatggaaagttaagactgcctgatccaaggtaatttcacgtttgcaaatcagccagctatccgtttttggattacggcgaacacaatctagccgcttaccaacataaaaaacttcatctcgctctttttgtgaacggtacagcaaataattggactgaacatgaaattggtcaggcaaatccgtttcagtaatcactaagtttgtcagtagatgacgtgtacgggatgggggttcctctgcccatgccataccggtctccaaccgagctatccggcgttcaagctgaaatttattgtcattgaacaaccaagtggttggcggctggatactcttacggcgatcgcgggtttgggcattaacaatggtacgcatggtatagctgagatcttctgataacaactcaagccaatcgcgaaatctccactcatccagtaatgcaatttcgtaatacaagaactggcttatttcatagtgcagttccggcgatactcttttttcctgattaacaattaactctttcatttgaccaactcctgctgataaacccggcttttttcctctatctcatcccaggtttcactggtgagtaagtcagcccaacgctgatacataccacgggcaacggtttcggaaaaaacataattggtcacacccggaattccatcatcccgcactctttcttgtcccaatctcatttccatgcacaaggtgctgttacgggctttgtaacctctaagtaccttctgaatttccacccaattttctgaatcatcctgttcgagaaaacctgccggaccaaatgcacgggtagcactgttttcaaaagcggcttttacttccggagaagcggctttatctgcgatgcagaacgcccaaacttccacctgatcaggtccacgtggatgccacacccgcatggttgcagtaccgttaagccaggaaagtgtcgggaaaatattgttgtgaccggcaagacgcagtgccctgacttttcccaacctctgctctgcctctgcataggtttcacggtagtaacgggcaacggcaccatcaacccaaacgttggcatcgggtttttcggtcaagaaaaatccacaaccgtgaccattctgagcaaattgcacggcatcttttgccgtttcccaaactggtcgtgaagtctgatcagcacctaatgcttttttatcgtcgccatcctttacgctcaaaacctgtacggcggaggcatgactgaataaagcatggtattgatcaccggcaaactgttcagcgggtaatttccaattacaattgatgagccatttttgcacaccaccaatcacttcggtccctccttcgcggcgatcaagcacaccatcaagataccaagccatatcaccgagataatcaatcaaggagggggctgtcgtatcccagttaccgaaaatcaatcctttataattttccacacacggcacttcctgaagtccccattgctctttgcaaagcccatgtggataagcgcacgcttccaacggaacgtcgattaatcgaccgtccacaccatatgaccaaccatgataagggcaagtaaaagcacgggtattaccgctatctgcgtaacaaacccgcatggaacgatggcgacattgatttaggaaagctttaacggaaccatttttctgacggacaacaacaacactgtcctctcccatataagtattgaaaaaatcacccggattgggaatttggctctgatgagctagaaacagccaacaacggccaaatattctttcgagttctaattgatagagctcgggatcgatataaatctgaggagttacacgaccggctcgggcatcaatcaggcggtaaatatctgaatctttgctcaatgtcatattattcagtcctcaagtaaaagaaaagttgactttttgccaacatgcaaaatgaatgctattaatagattaatattttgtgaaatacattgtttgtttaaattaagactttttttcgatatgtgaggaaacagcaatggaattaagacacttacgctattttattgcggtggcagaagaattaaactttactaaggccgcaaaaaaattgcatactgcacagccttcgctaagtcaacaaataaaagatttagaagattatattggttctacactattagagagaaataaacgcagagtctctctaaccaaagccggagaagtttttttacaacaagcccggcttattcttgaaaatgcagagaaagcaaaaaaaatggcccgcagagcggcacaagaacaaattgtgctaactatcggatttgtcccatcagcagaagttaaagtattacctgaagtcatcccaatatttcgcttggctcatcctggagcaaaagtagaacttattagtttatttaatccaggacaagaagagaaattattacaaggtgacattgatgtcgctttcatgcgcccgccaataaagagtgattctattgattttaaagtcattcttaatgaaccgctggtggttctgatgcctgctaatcacaggctaagatattgtgagaaaatttcagtcaacgacctacaaggagaaaattttattactcctgatccaacacaatctggtgtattacaacagattatagaaaattattttactgaacataatgtcgtacctaatattattcaaactgctaataatatgctattaattttaaacatggttagtctaaatttagggtgtgcaatagtacccttctatattaccagcatcatgacagatgccgttatttgccggccattatcaggatattctcccacaatagagttaataatggcatggcgaaaagacaacacatcagaattattattgcacttaatagatgttgttgaaaataaatatctgcaagaataaaaataagcatcatcgtttttttctttcagactagacatattaagtattagtgaatattacccgctgtcgttatattaataacgtattaatttaaaataaataaggaagatatcattatgtcaatatcagcgaatcttcaacataaacttatacagcccgaattacgttcgctttggtctgccattgccagcggtgaaatccatctacatcatctcaatgtaaaagggataaaaactcgtgttcttgaagcgggtaacggacctactctgattttcttgcatggtattgcaggtcatttagaagcttatatgcgcaacatactgccccatgctgcccattttcgtgtactggcaattgatatgctgggacatggcttcacggataaacctgtccgttcctatgagattatcgattatgtggaacacctacgggatcttattgaaacattaaatctgaagaaaattcacctttctggcgagtcgctaggcggatgggttgcagcccggtttgcggcaaaatatccgcaatatattcaccgtctggtgttgaacaccgccggtggcatgattgctgatccaaatgtgatggaacgcctgcgcacactgagcttaaatgcagtgaaaaaccccgatcgggaagctacccgcaaacgtcttgaattcctaatggaagatcctgcaatggtgacagaagacttggttgaaacccgttttgccatttatcgtcagccgggtatgttgtccgcaatggaaaacatcatgtgcctgcaagatatggatacccgtttacgtaaccttttgaccaaagatgaactggcaaagatccaggctgaaaccttagtgctatggaccacacacgatccgactgctgcggtttcagtaggccagcgtcttgccgggcttatcaaaaatagccgttttgtcgtgatggaaaaatgcggtcactggcctcaatatgaagacccggacacatttaaccggctccatatcgattttttactcaacggcaacaaataatgtccctttcagacgagtgatattccaattggaatgtcacttctatggtttgagcaggagcaacaacagatgaataacgtcataacccatcttggtaaaaaattgtttcaatcatggcagagtcatcaagccatcgatcctatctctgatgaatatccagaattaacgttacacgacgcctatctcatccagcaaaaagttattgcttaccggttggaaacaactggagagcgaattgtcggtaaaaaaatcgggatcactagccaagcagttatggatatattggacgtcgatcaacccgattttggcattctcacctcagatatgcattacaaaaacaatgccactgtacccattgagcaattaattgcaccgaaagctgaaggtgaaattggttttatcctgaaacacaatctgtgtggacccggtattacagcaggagatgtactcagagcaacagattatgtcgtgccctgtatcgaaattgtcgattcccgtatccgtgactggaaaataaaaatcacagatactgttgctgataatgcttcatcagggttatttgtcattggcaatggcacccgtctgccctcagaaattgatttagctgccgtgacaataacgctagagaaaaacggtaaactggttgacactggcattggtgccgctgcactagggcatccagccaacgcggttgcctggctagcgaatatgctaggaacactgaatatggcgttactccgtggagaaatcattctctctggctccctcaccaccatggtgccagttaatacgggtgatcagttgaaaattaacttactcggtgtgggatctgccaaggtcagttttgcttgaaaaattagccttagtttattaataggagtcataaaaagcccccaccaaagttactggcaataaagttattagtaacttagttattagcaggggcgtaaatggcttattatcatttcaagcctaatagaatgtattcctttcgttaatattatttttaccaaattaaaaacaataatttcataagtttcgtggtaatacacatctgtcattccgcagctatatctgtaatatactgatttaaaatcgtttgtataaaatttatgcatttgttaattcttaattaaaacaacaaattatgaatgcggtgcggaatgtcggacacattcgtcgttttcagcgacaacattcatcatgtcttgagtcgtattttaagttctgtattgctgaaaccgatacggcattcaatcaattccgcaagagcaagggcgtttttttctttttttcggttacatacgatctgtaatgaaaatggtaacccctgactgtttaatcctgttgggatggagaccgcgcataagtcagcaaagtttacgaaacgggtgaagtcatttgggggttgatgttcatctttttcagctataggccaagaaggttctggggttgtaggaattactaaagcatccacattctgaaaccaattcgaaaatatcttccgtacgtgacgacagaatatcaatgcttccgaatactctttctcttttatctctttgccacgttctaatcttactttaattgtatcgctgagggagttctgtgaattacacaaatatccataattctgccaagcctcaaacgcagtaatgatagaattagccttcatgcactgcgataaaggatatgggaaaggtttcttttgagttaccatacccatttgagaaaaaacttccagcaatgacacataatgcaaacctgtttccttatctaaaatatattcttctgacggtaatatgccaatattcagattattaatgcatgaatgatacgctaaatttgggttcagctgattataaacaatgaatatatcagatgcatgcttggcaataattcccacagtatccatcgtctggcttaatggaagcatacctgatgatgacaaattgcccattgatggccgaaacccacttacgccacaccaagcggcaggtatacgtgcagatccccccgtgtcagttacaagagcaatcggtgtcaaaccggctgccactgctacagctgagccattgcttgagccgcctggagcaactctctgtgattgtccccaagggttgagtggcgtcgggctattttccatgatgcccgttgctcccataccgagctctactgctctgtgttttcctgtcagaatcattccctgtttcaagagggtggctaccactggtgccgtaacatatgctttttgactaaaacagttcgtgcctcctcctgtgaccttacctttcagatcaaaaaaatccttaacagcaaaaggaataccatggagaggaccacgccaatttcctgatcgtatttcctgttcggcatgttttgctgcggcccgcgcatcagcttcatagatctctgaaaaggcgttcagcttatggtcgtaacataaaatacgcttcatgtactcacctaaaatctcaacaggtgatatcactccgctccgtattctttctcctaattcattaattgaaagactgataatttcatccatcatttatctgcctttagtgttatagaattgtgatattcatcaatatcattttttacaaaaagaaaattgataatcaagatggacagtgtggctatgataatagtaataaccgcatacttcatgtttaaaacaaagagtttttcactgtttaccatttgcccaaaaactgccacggcaaaagcggaacctatctgaccagttgcacgggaaactcctgaggcaacgccagtgtactgtttcggagtactttgcataaataaagatgttgacattggtgatcccagccctccaccaaaaccaatcaacacaagtggaacaaaaagataagcatagtcattgttgaactgtgtaaccagtaatccactgaaaccgactaatcttatcatggccccaacaatcatcatgtggctcgtctggtaacggcgtgcaagccatccagagaccttatttcccaatatgacactgattgagagcggtaacagggccatacccgtttgcgttgcactcaggtgctgaatatcctgaaaccaaaaggtcagaataaacatggcaccaaaaaaggaaaaagcgccagaaaagaaaatccatgaaatagcgctaaaatttggccgcctgaacagctccagtggaagcataggagctttacttcttctttctaccactatgaatgcagtcatgatgattaaagacaagcacaacaagataactgagttcaaattgatttgaggagagtcattcagccggatgacaccagcaataaatagaaatattgtcaggaaaagaagtagctggccttttatatccatagttaaacttttatgttcatgctctggagactgcaccctaagtgtcaaaaagatccctgctaagcagagcggcacatttactaggaaaatcgatctccacgacagatattcggtcagccaccctcctatgacaggccccgccaccagagcgatacctccccagctcgcccagctggcaatggcacgggttcgttctgttttatctgtgtaggtatgagtgatcaaagcaagtgaacctggtacgagtatggcggcggaaataccctgaagcacgcgaccggttaataaaatagcggcttcactgctaattccacacaaagcggaggagagagtgaataatccaagccctgtaatgtaaacactttttgaaccaaaacgatcacaaagagctccccctgatagtaacaaacttgcaaataaaaccagataggcatttacaacccattgtaacgttgttacaccaagtgaaaggctctctttaatagtcggtaaagctacattaactatggacgaatccagaatgacgagtatgtaacttatattagctgcgagcagaacattacgcttgttacgcttcatgttgtccataagcattccccgattaattacattccactaggagtattgatattcagcgcaatatcggtacggtaatgcatcccttcaaaatggacttgcttgaccgtttcatacaacttttctctagcctcgttgaacgtcagggctattgaacttaatgcaataactcttcctccatgacttattagttttccatcatcagatacaacggaggaatgaaagatatgagtatcttctgaaggtaacggcaagatgagctcatcaccttttcgctcggtaaaaggataaccttcagacgatatttgtaaggcaacagaaacaagcttactccagcgtacatttgctttgcccagctgtttttgtagggtcaatatgaataattcatgaaggggactctcaagtcgttcaaggatcgtgaagacctctggattacccagccgacagttgatttcaagaaggctcggcattccttttttgtcaatcatgacaccaaaatagaggaatcctatatattcgattccttcagaattaagagctgccagacaaggttctacaatttgggtaatgatagcctcatgctgtgcggaggacagtactggggaataagctcccataccaccagtgttagggcctttatccccatcaagcagctttttataatctcggctttcagccagtggtagatagttttttccgtcaaagaggatggtgtaagagacttcttcaccttcaatgaattcttcaaccagcattggtccgacatttcttgtgaaaaactcttccagcgtgtttttaacatgctggcgatcctgggctatcactacacccgttcccccatgaaccataccgtctgctttgataaccacaggtaaaggtaatgtgtcggcaaatttttgggcctgttcctgtgattcacaaattgcgctgtaaggtgtaggtatttgatattttttcatgaattttttggaaaagcctttcgaccattcaagtcgggaggcttcacgagtcggggcaatgattggtaacccacgagatttaaagtagtcggctaccccagctgccaaagtttgggtcggtgtgataagcgtaaagtctgcttttagttccagagcagccctagccagcccctcaacatctcctgaagacactggaatattttccattccgggtgcgcatgacgtagccggattacctggggctaaccatactttttctactgctgggtcctgtaataatttccatgccagcgcctgtgcgccggcacctgaacctgctataaggattttcattatagtcttctctcaaaacacagggttaaaaggaatttcatcagttttgccacctgactaaatcatcgatccagtcggcaaaatgttcaattcgttcagtaagttgtacatcactattgccggtaattatggcgctaacaacgtcatcggtataagttgttgcctgttgataaatttgcccgactctccctgataagcagagtgtggatatccaatcataaggaactgaatctggcaaagaaatcagatatgccggacgaacaggaacgcgaattgatgctgcgaattctcttggttcagtccggactttcagtacatcattgatacctgcacaactctgtatccaagctttatgtatatttatcccccaagtgtgttctattaactcccccgtaagtgaacccgcagtacgggccgcaatctcgcataaaattaatcggtcatcggcggtgtggaatatttcggcatgaaacccgagggtaggcgcagcaggcaacgctgatatagttcgataggtaatactgttcagtcgctctgccaagggggtagcaggatcaatagtacggctaccaaatatacctgcatgctggtaatcaagagcattattgatataagcgcagggagcaaaaaatgaatctcctgcttcattaattacaccgttaacatgatacatatttccagagataaacttttctaccatccagccatcaacggttctgtcgcggaaaaaatcggatacttctctgagactcctacataccttaacgtatttcgagctgcatccatccaccggttttatcacaactgggaaattatgctcttcactgaaagttagaacatccagccaactgccaagtcgtctaaacggagccacttcaatgcctgcacgttgaagataatctttcattaaaaccttatctcgatacgccaaggcactttcaacgttctggcctgggaggccataatattcccgaagttgtgcagctcggataaggtcaaattccgaatgaggcagaatctggctgaatgaggtgtgacgtcctaattctgtggcgatagataaaacaccttcaccgtcatcaaggctgtcgatctgccggacgtaccggtaacggtgctgaagaggaaattgtggtgcagaactgataagccacaggtcatcacggcattcctccaaccattctgcaaagttaatcttgatgcttcttccgaggcatagtattgccatgctttacctcacataacgtcagaaatgggtttgataatatccaatacagtgaaatcgccccatcgagtaccgttatcaacaagatgattgaccgtcatgtcctgccgagcacaacgcctcataatgcgtaaaaaagcatgccattcatcgcttccatgggaaacagggacaggggtatccgcttcaatataaagtgggagcaaatgagcagataaaatttcgttcggtgaacatcttgtcagaatggctgcggtatatcgtgcataatcaggcaactgaaaaccggttttcgaccattcatttattgagcatgagagagattgatcgaaaatgaggtttcccagtccaaaacatgtcagcatgtttttgtgccattcaacacctcgcaaggaatgatgatgatgacctatcactaggttcacaccacattgtgataatcgttttgatatttccttttcgtatcttgtaataatgtctttacgagtatgatcgccccagtgcatcgctgcaataataaaatcagcttggctacggatattgccaactaagcatgaaaaatgtgcccaatcatcttcattgatgacagtcataatatcgggtaacgctccgggaaccacagctccggaaaaaggaggactgtaataatctcttgaacgtaacgctgcaacgcctccctgaaaactaccggcttcagttccgacataataaatgcccgttacgccgaaaacagcaaccctgatccctctacattcaattaaagcaggttcccaagcttgctgaaatgtcagaccggccccggtggtttgcactcctgcagaatgtaatgctttcaaggtgtcagtcagaccctgcaatccagaatccatggcatgattattcgcaagggaaagcacatcgaacaatgccacgcctttggcgttttttactgatgatatcgtcaatccctcgccgtccgggaattggctcaggtttgtcagtcagtacaccttcatagttaccgataacgatatcggcattctcaactaaagacgtcatgtgactgaaagcagaagcgggatcttcacgattaatgagcacatccccaaatgaagcaatagtaatactcgacataaatttctatccttctgactaacgctggtcgttgctcaaagccttttctgcataaaaatacgggcatttccatccggtaaagaggacacctcaccaaaaatgctgtaaccatgcttcagataaaagtcaggtgcctgaatcgccatggtaaacagcaccgccatatgacatccacgtagagttgcttttttttcggcccgtttcagcaatgtacttcccagtccctgccgacgcagttcttccggaagaaagaaataactaatgaaaagcacacccagagaggtacgacccaccaagccaccaacgacttcaccttgctggtcatagacatagaaatccagcggctggttgtcagaaatattggtttgttccacattccatatatcaagtaactgactaatttttccccggctttcaacatcaccctgatcggaacttttgatggagtgcccggagtccagaatatctcgattcatgcattgatcctgattgaccgggccgatatatcgtcccggttggttatattaagttgccgtactcgccaaacgcgtttccagaaataactgctcataatcacgaccgcgagctgttagtgcgggcaccacaggtctgccatcggataattcgatccagagccttaataaatggcgctggttgagtgcatcatcctgaaactccgtgcgggaatgcagtgtggtatagttgttgagaaaaaggatttcgccaggctcaagcataaattcgagtctgaactctgggcggctacatatttcataaaatgcgtggagtccagcatcaagtgcgtcagggagagctagtccctgaagttttgctgctgctcgcatataagcaccgagacacatagagctcaccctgcctgacatttttgagaaaatcggaattttgtatgacgtgtagggaagtttactcgaagagcgttcagctgtagcgtaatgatatccttcaaaaagggcgtcaagtagttctggtttttcccttaacatttgattgtagatagctaggccacttacgatttgagtcaatccccctgaagcagcctccctcaaacacataagcccaacaatttcaaaggcatccgaatgaaatccaagctcccgattagacatatagcctcgattattcggattatttttctcattccttacatgacctatcctgtgaccctgtgagttttgtacgactggacgtccaagacctgttccaattccccagaatagatgactcaggattgagtcagtaaacatttctcgcggaatacctgacactaccacaaccccgcgtccttcagtcaaacgctgatgaatgcgctcctgtaagatagttatttcctcaaagctaaaatctgaagcattgaacgcttcactgggtctatcttccatagcggataggtgatgcctgaatgcttcgatttgttcatctgaaacaggcaatagcacgtctttcttgctttccaactgcgctgagcaccatactgccggatcgtcatcaataatctgatatgattcgttcatgttggtgtcctcaatatgcacaaagttcacaatctggatgttgcggtttatcctcaacattcgtttgtagagttgtgaatgagatagttaccagtttccctgctgaaatcattggccatccaacaagtttcctgatgatatccgcagacatcatccctccgacaatcattgccgaataactgaaagccgaagtcgcagggattaaatcatgttcttctcgccaggcgcgcatggagtaatggtcaggatcctgagtccgtgaccacttttcgtcgcagcggaaacaaccgctctggtcagggaattttgtccagaacatacccattccggcagaaacgctgttgaaaacacccggaattcccatgtcaaaacaggcgtcactgatccagcggtcagcagcgataaccggtcggtcaattgcagctacgacgatatcgggtttgaattgagaaattaattccttaacaacatctgaaccggttatacgcttgaatactgtatttaccgtgacgtccggattgatcttattaagacgagattttaacccttcgactttccgcatccctatgtcatcaacgatataaagctgcctgttgaggttactaagttcaatatcatcgaaatcaacgacagtgatggtaccgcagccagtcattgccagcgccgttgccgtgcagcttccaagcccaccacatcctaacagtagcacatgccctttgaaaagtttctgctgatactcagcgggtgaaatgccattgtcacttaacgcagcaaatccattgagatttcgggaataacgctctctttgatcggcaccgagagcctgataatcgaaatatttctcatcctgaacgaggttgtgagattgaagttcctcgatcaattgtgttaacgccgactcttcaacgtcatgaccgttttgcttcaatactttaagaagaccactgctgttcaattttccttgcatgtggttaagcgcaactattttccagccatcgggatctggaattattttgcttgcttcaccctgacgggtaccggaatgtattgcaatggcattattgctaatcggaacagcaacaaccgttggctgaagccgtggattgttaagtgaaatggaattcgccatagttatgcctctttaatttttactaccggcaaaagaattccccggcaccctacattcatgaccggatcaaaactggcacgtgcctgaaaacctgcaaaccggccaccatatacataggtatccacacctgaccacattgaatctgtaacgccaatatcaggatgaactacggaaatcacacgcccgcgaatgtatcgttgaatgacccatgtttcgtcgctttgcgctgcaagatgtaaggccgtttcccattcctgagcggtggtaaacggaccgaccaacagaccttctcctcttgttgcattagaaggtttgagcacaagagtccctcgttcttgaattgcccaatcaactagatcgatttgccttccctgaggggatgtcgtttggcatgcgcggaggatgcgtgtccagggaatatgtttaagacaaaaagccttttcctcttcaggcaggaaaaagagcatttgcggatcacttaggacagccattatagctttatctgcgagcggccattggcagatgagaggattgatgaaagtgacttctccatgagatgttgcagtaaggtattcttcaacttcaggttcatcgatcaaatcgcgcaaatcgagtttgttatagaccacatcaataacacgaccctgcggatctattaccttgttgttatgtcgacgtaatagagacgcatcaatttcctcggtaggaacccccagacgattgaaaccatttaccatccaggttacctcatttttgaaccggcctttataagtgacaatggctgctcttctggctggctctccggtacgttcgcgatgagtttccagtaatgtctcaagaaataaatccggattttggacaaagggctgaaaatcggcactggcttcaataccgttcagtaaagggtttgacacctctgaccataatgcacctgcaatcccattttggatcactcccccggggcaatcggtattagtttccaagatctgataagttccatcttcactgaaaagaccatccaggcggaaaattctggtcaaaggggtatgatttggcaaattaaataaataatgttcgcttttcttataagtcggaaaatattcacgtatcgagacattttccacccatgcatgagcaaatttttcaaatacttctgtaaaacgctcaccgatgctggcgagttgccgaattaggttatcagacaaaagaagaggacgaattgaaaccggatagttttttccctcaaaatttagtcctccatcaatgagtttttggcttaggcttttctgcgcttctaataaagaggatttttcattttcgtcaagactaagtaattttttttcaatcaagatttcgtcttgataaaacagagtgtcatgaggtgttaatgatgaagtatttattttattctccatacctaactgaacggaaacttgttttagagatttttcaagtaataataatccatgctcaaggacattgatttcgatagtcaacgggggaagtaatttgatgacctgtcccagcggaccacatgtttctataatgagtcctaactcagtggcttggtttctgacattttctgctgcctgcgaagaaaagagttctaagccccataacattccttttccccggattgttctgatcaattgggggtatcgttgatgcagacccagcagatatttatgcacaatttccgatttgtctttaagacttcgcaagaaatgtggatcatgccagtaatcaagagcatatgtggcaccaataaatgcaaggttattaccacggaaagttccgttatgttctccaggttgccatatatccagttccggtttcattagaacaagagacatagggagtccatatcctgaaatagactttgcaaggcagatgatatccggttttatcccagcatcttcgaagctgaagaaagttcctgtacgaccacaaccagcctgaatatcatcaacaataagcagtatattgtttgcagctgcgatttctgctacaccccgtaaccattctacgcttgccacattgacgcccccctctgcttgaatagtttcaagaataattgctgcaggcaagtcaataccggagcccggagaaactagcattttctccaaaacgtccagtgacgtgtcattctgactaaggaaattttcgaaaggaaggcgtactatattgtttagggaaacacctgcagcatttcgttttttctctctggctgtggctgcaagggcacccagagacattccgtgaaacgcattggtaaacgcaacaatatcgctgcaccctgtaactttgcgtgcgattttcattgcagcttcaactgcattggttcctgtcggcccggtaaactgaaaacgatactgcaagccccgtggtttcagtatctgctgattaaagctttcaatgaatgcccgttttgcattggtatataaatccagagaatgagttatgccatctttttcaatatattcaataagatgagattttaatcgagggttgttgtggccgtaatttaatgatccagctcctgataaaaaatcaatccatgatttaccctgcttgtcagtcactaaggcattgcttgccgtagtaaatatggccggatagttacggcagtagctacgcacatttgattcgtacttttcaaaagtcctgcacgcgtcttcagtgaaaagtatctcattttttatattttcatacacagcatcaaacattctacagcgcagcaatatcgtatttttaccaaccgcctttactcgcttcgataactgttcgttattttctataatattgtgaagaatatgcatcatggtaatggcatgatcttcgtcctcttcaatatgtaatttgaaaaattctaatccccgttcagcaacacctaagtgcgtaagagcatgtaatacgggcttgtagatcattggaacaattgcttcggcccccaagcaaagtgcagctaaaccatcagcaatttctcctgagcggcaataattcaggacacacgaagcaagatgagaggtttcttcaagtgcaggaatagaactgacctgtgcacctgtttccatcaatgagcgctgaaacaactcagcgtgagtgacttttccctctccatttacccccatctcttcacgtaaattttccatcagatgatgaatatcattgaagttatcaatatggctgatcagagcacacaaaaagcgagtaaagttacgtgaataataatgatgttgaatcaagaaataacgcattccggacagagtgattcgttcttcactcattgcgatgagtaacgggtggttaaccagttttttcaccgcatctatatccagccagttatcccagagtccttcttcggtcagtaatcctatatcttttttatcgggtaaagttacagtctgattttgttcactcaccttgcctctcctgtttctgaaataaaacgcatctctgatctctataacaagcagttctttactagtagcaacagaataagtactgcggtgcttataacctcttaacaatcaatgccagcgaaaatatacccgttatctttcaagttgcctctttgttggctgcactcactcaccccggtcacatagttacctatgctcccggggattcgttcctttgccgtcgcgatgcatcttgaaatccatagggtataaacatttcattgatgaaaccataaattatcttaacaatcatttcaataaattattaatcacgcaaagtaataaatattcaactatttgaaaaataaaattaatatctttatgggagtatgagtaagtaccaatatcgcctaatttcttattaaaataattactaattaaaataatttccaataggtatcaattgatgtatctaaatagatatatggacaccgactcgattcaagtagataaataaattttctggcaacgaagtcgaaaacatatattcggcttcaatgagcccggatgaaaatcggtactctctgccctcattatttcaattgatgctatacccgttatctttcaagctgcctctttgttggctgcactcgctcaccccatcttagtgaaaaattgtttcaatcatggcagagtcatcaagccatcgatcctatctctgatgaatatccagaattaacgttacacgacgcctatctcatccagcaaaaagttattgcttaccggttggaaacaactggagagcgaattgtcggtaaaaaaatcggtatcactagccaagcagttatggatatattggacgtcgatcaacccgattttggcattctcacctcagatatgcattacaaaaacaatgccactgtacccattgaacaattaattgcgccgaaagctgaaggtgaaattggttttatcctgaaacacaatctgttatgacaaattgacagattattaccggaggaataaagaataatgatcaacgaagcaattcaggcagcaaatggcttggtaagcattgtccctctcttagggggcagcacttcacgcaaagattatgatgaggctataaagctggtagaatatctggtcgagcaccatccagatagtccgctggtcgatatgcttacagctaaaattgacacatacgaaagtaatgcgccagagttcaatgaacgtattgctagcacacaaagcggtgtcgcaattctacgtacattgatggatcagtacggcctgaatcagactgattttgaggatgaaatagggaagcgttcccttgttagtcgtattttgaaaggtgaacgttcgttaacgcttgaagctatgcgtaaactctcagttcgttttggtataccggttagtgtttttattgattaattgatagcaaaacgacacaaccgacaactgcggccattaaaaaatgctggcattacccgtgtagttgcgggtttttaaatcatcattcatgcaatttcccctttcttcccttttattgtctgacaggccagttgcagcaattcggcctgtaggctccaaatttcttcctgcgaatctttcagcgccgatcgaacctcttccagttgcacggtcagatgctcaccggtagtgctgcggcggaccacctcctcgcgcagcaccttctcactgtcatttaaagtgagcctgaggcccttttcattggctcttaatgcgagcaaaaaaggtcgatgattgcaagcaagcggctaccgctaactttccagcaacttctgcggtattaactaatacagccatattggctttcgcagaaattccatcggtttctcgatccaccattctcatcaaatactttgtcaacgagttgccaacaatatttttcttcttagcctctaatacagcttcctgtataattatatcaatcttttgattatccagagcatcctcaggcttagttggcgtcgtaattaataccccttttcctcctggcagcatccaatttatctcaatagctttggcaatgacggcaagttcatcaaggcgctgtgggcttttgaatccgctggaacggcaatagaatgcaggaaaatcatccgactgataggagatgactggcacattccatgtctccaaaaactccaatgttaatccaatatcgaggatattttttgcaccagcacatacgacagcaactcgggaacgcgttaactgagtcaagtctgccgatatatccatactcgtctctgcccctcgatgtaccccaccaatacccgcagaacagaagaatttaatacccgctatttctgctgcaagtattgacgatgccacagtggtcgcccccataccgccactcgctaacacgaccggaatatctcgactcgtgacctttggaacgtgagatgctgtcgcaaatttttcaatttgctcatctgacattccaatcaaaaattcccccttatctattcctatcgttgcgggtattgccccactttcacgaacagcctgctcaacattcttagctgttgtgacattatcaggataatccaaaccatgagtaatcacattagattccagagcaacaacaggctttcctgattcaagtgcttcttttacctcaaggctgaatttaaatggaaccttattgctgatattcatactatataccttttaatttttttgatattatcgactaaatactgaaccttgcagattatatttctatatcgctggtaattttaaaattagattattttctcaatctcagcaacaccttcactttccaacagttgatagtgatccgatattaattcaattattttaggcgacattgatgaaatcacatccgattcctcgataaatgaatcattatctctattcgccttgaaaatagttataggtgcctttaggtgtctgtgataaagctcatcaatactgtacttgaaatcataagtcaaagtcacaatcctaacgatacgttttactaatgatggttccaagtttttaaaacgactacatataaagttaataaatgtcgtttcactatttacttgttctaagcaagttttaaccattgggctgttgattgaacgagaaaatacagaaaaaagtattttaacaaaagccggattagtaaattcagcgcctttatccatatattccgcttgcttcatatcaagatgaggagatcccggagccaataaattcaatgcgttaacttcttctcccgcttgttcaagctggtatgcaacttcaaatgctactcgggcaccaaatgaatatccccacaatatatatggcccttctggctgtattttctttatctctttaatatcctcttctgccattctctggatagaagaaaacggtatttcactctcgtttatcccatatgcctgtattccataaaatgcccgatcaggaacgactttattagcaagcaatctcaaactcataggatatccgcccaaacccggccaacagtaaatggggtctttgcttgcctgattcaataaaattaatcttgatattgttttagagtctgtctgttcaatccacttagccaattctgctatattaggagattgaaaaagtatctgtaacggaaaacgaatattaaaggccgcattgatcttattaaccattgcaacggccatcaaagaattacccccactttcgaaaaaatcatcgagggcagatactgaatcccatttcagtacttccatccaaatttttccaagccttatttcagtatctgtatgtaatggcaccaatagacgctgtgttgaaacattctccacggctttagattctgataaagattgataatccacttttccattggccgtcaaaggtaatttatcgaaaactaataccttatttggaatcatatattgagggagttgttgttgaagatcatctttaatgatttcaactggccctttcatatgaacaacatcttctttcatgccttcacacatatattgcgcttggctaatacccccacctatgcagaaataaaatgccgccataggtctatcaagtgcattgagaatagatcgcatccttttcgccgaaggtaaatcgttattgctcttcgaactgtaaccagatgacattaatccaatatacaatggattactttgtaacgcatgtaaccgacgacccagtgttatataataatgccattcagggacacagcgtggaataattgacacgccaaaactggagcgatcataaacttgctgattaatcgcaataacatccttttttcggacaatatcatcacttattcgtacaaattccccgttagaaaagtgatataaaccacacggcatctcaggtattttatgggcatgtgtttgtaaataaatatcagtctcaaatggcggcaatccatgttcatagctacatatttcaaatgcaccaagataataatcctgaatatcaccatcataccaatctggacattcatcttgatattcacttttaccaatactcaagccaatttccggtaatacgtcatcaaaaagacccatcatatggcccgcttccatttccagaacttcttgtatattgttcttataaacgggctcaatggcttcatgcttgccaataaaatgcacttttatcgttggcatttgccgacgactcaatgttgaaatttttattaacttatgtgtcactggatgataatagtaaatccccgcatccaaaccgagaacattatgcaattcaaaatacatttgtgtcgcatagagagcacccggtgaagcataggcatatttgggcaataaacgttgatggctggtaaactgaccaaaataacgcaatgcataaccgaaatcattcagggttagatgactcagtggcaaagagctaatttcattcgattgagtggctgtcagcaatttttttaatttctctaccgttatttctgttccctcaaaatagcgatatgtcttgcgtccaaatgcatattctctctgttttatctccccttcttgataaggaagtaagaatgtagggcgattttcacataactcttcacttcgacaaccagaattagaaagttgggctttcacctgtagtttatcggcttttgatttgtgatgtgagctactattaccttgatccatcaatgcagcttctttctcatctaattccacacacgcgatgagattttggaaacccgttctggcatccttcttaattaacattgccgccgtctttatccagctatgttcttcaatcgcatggcgtatttcatcaagctcaatacggtaacctcgtaatttgacctggctatcaacccgaccaacaaaataagtattaccatcagcccctctggttaccagatctcccgttcgatataaccattgatgttgagttcctgatacaaggtgattacaaataaatttatcttttgtcatttctggtttatgcaaataaccacgtgctaattgagcacccgaaatataaagctcgccaatttcgccaaccgccacaggtaatctatcatcatcaagaacgtagtattcggtattatctacaggtgcaccaatcgaaatagaggtttgataattcggcaaagtctcatttgtcacccggaaaaatgatgaattaatcgtacattctgtcgggccatataaattgattaattcacagtgagtaaaactattcaaaaattgcgtggctaatttggttgtcagcgcttctcccccactgaatacttgagtcaatgataagcaatccaaaaaattaggattatccagtaacgcttgtagcaaagtaggaacacattgcaaagtcgttacttgatgctgaagaatggttttaataattgcatccggatcgcgatagcaacctaaaggacccataatcacttgaccaccaattgcaggcgctagaatttcccattgagccgcatcaaaactcattggtgttttctgtaaaatccgggaatgacatcctaatttgaacgcttttgcaagaaatctcatttgatttacaatactgtgatgttcaatcatcactccctttggcttacccgtgctaccagaggtataaataatataagccagactagtgggtttaggaacttgaactgtgcccagaatatcttctattgttcgtgtttttatcgtcagagcgacatcttctggtgtcataattaatactgattttggtgcaatgtcctgtagctgtgcttttaagtgcgattgcgtaaaaatcacatcaataccagaatcttctatcatatatttgaggcgttcagttggatagtcaggcgataacggcaaataagctttatccgctgacaaaataccccatgcaccacaaattaaatctatagaaggatcacaaaaaagcccaatacccaccgaattctttgagctaatttctgacagacaataccctatctctttcaccctcaaatagaaatcagcgtaactgagagattcttcttgatcaataacaacatatccatctgcctggtgcttaagttgactctcaagcatatccatcaatgttattgcttcttctttaagataaacatcattgattgagtcacattgtgtaatattattttctaacattttcgataactttatataataataaaatgaatatctccgtagttaaaaatgacattttatctacggaattataagtgcctttttgctcatgatttatgacttatattttattaaaatcatgcaatcagttaaattcaacaaagacatacctttcgaggcagattaatacccttaccaattacattattcaatgctctccgaaaataaaacggttattattctccacggtaatactggagtatttttttgtagtttcgtgataaaattcatctcatcacgatatggaattatcaatcaattaattcattattctttaaatattccaatattattcaattggtgcttcttcgaaagaaggaggaagcaaaggagtacttgtaaattgactggatgctgccctataaatagttaaaccctgttctttccacaattgattcatcacataaaccagtttcggattatgttcttcctcttcctctaatgccctggcaataatatgcgaccactcctgttcccagacaggataagtcatttcgtcttgcctgaatgaataagtctgattaagcgccgaaaatttggcaggcttcgataaatcagttgttgaaaacagaatgcacaacatgccaacccagtaacatttaataatatttttactttcctcagccggtaaacgtgaagcgatatttttcattgcaaacaacgaggtaatcaaatgaagaaacaaaaaatcaccgggtttagcgagataaattaatgtcacgacataaaataactgcgcccaactttcttctacattttgcgtctcaatccaaaccggcaaacggtatatttctgggtgaccttgcattaaaatacgtgcaatacgatattgaagaccagatctttttaattcaggatgtattaaatcagtatcggccaaatcttcattatcaatcaacgaattcacccaatcggtcaattctgctctcctctgctcccacagtgttgaaattcgcaatatagaatcaaaagcattcttatcgtttagcgaactatcaataaaagcgcgttctgaatggcaaggaacgtacgagaatgccatgtaagcaagtccttcaataatcatccacggatgattaatatccaatgcccaacctaaatgaatggtaccgtgagttaatgcaccagcccacccagacaaaagcgttggcatatattcttgtaatacttgttcaatccctttctgtttaatttcttcttcaaaataatcacagtaagaagaataacttgttcgcttacccaagaaatgtttccagttcgaactatctaccacgtgctttaatgttttagggggttccagccccataccataaggcgtcaatttaacataattatcataatagtctttaattctgctagcactgatccctaaaccatgcagtgctataacagcatgtttaatgtgattcgtcaggtgaccgttaaattcaatgtgatatgagcgatcattaagtagtttattaatcatttttttaccctacccttattttaactcagttgtttttctagtgagataaattccaattaacacaaacagtactccaacaatttttaccaacccgggcgtcatcccctgatatagccaatcaagtagtaccgctgataacatttgcccggcaataacaaggacagcggcattcatcgcccctaatttaggaaaaatatagctactgactgctacaaacaaagcgccaaacaccccacccatataagccgcggttgggataacgctaaaatcccatttattccattgccagctcgataaaagtgttaatatcactgttaagagaaaaaaaccacctatatgattccaaagcgaagcaccaaaagaacctatcgagacacttaactgcccattaatcgtccttgtcgccgcgataaatatgccatttaaaaaggcaataaaaatcaagctcagcattagttacttcccccaaatagaattaatatactgccaaatagaacaaagaaaatcacataaaaatcttgtatcactatctttctttttcttgttcctaaaaacccaaagcgatcagcaaccaaaccaaaaagtatttgtccaactaaccctaatgaaattgtactggataatggtagtccaccattaatagcaatagccgccagcacaacggtaaatgcaccaggaataccaccaagataaaaccatataggaatatttgatttcttatgtttactttcatctatttctttcctagaaaagagcttagatacaataataaacaatatcaaagcaacaatcgcgccaatgccatgagccacccatgatgcaaaaaagggtgttgtactttctgacagcatactattggtgtaaatcatcaacgtcagtagacttccaccaataactgccagtaagatatttcttatcgtattaatcatttaagtatattttcctcaataatacgaagtacgtcatcaaaacaattagctatccaagttggcttggcttctttcaacatatcgacattatgtataccatatgtcaccgctattgatcgcagaccaacggcatttgccatatgaatatcgtgagttgtatcacctaccataactgccatctctggtgtagcaccgtaatattccaaaattttccttcctgattctggatcaggtttaggttttgaaacgtgatcagcaccaattacctcatcaaatacaacgtctataccagcagcctgaagtaatgctgttgcacttgcggtaaatttgctggtcgctacagataatttcactccctttttatttaaagagattaatccatcttcaacaccaggaaataataattcctttgctttcggcagaatacatcgacgatactgtaattgatattgttcaacagctttagcgattaacgcctcttcaggcgatatattcaagagcgttgcaaatgctttctctaagggcagaccaattgtagtacagatgttttcatttcctaccaatggaatgtttaatcccttaaaaacagcattgaatgtttccactattgcgcgagaagtatcaaacaatgtaccatctaaatcgaaaatgattattttattcattaaaaaaatacctttaaaaaatcattaattataaaataatttaataacctggagacttaatcaacaaatcttctttaaatttaatttcaggaaaataaacctcttcattccatttagccttttcgatcggctctaatgaaatggaaataacatcctctttacaaccaaacgctttttttaccaccttcgtcaattctaaagataagatatctttatcttcttgtaagaggttagcaggaaaatgttttatattaatatgtggcatatgtcatccttttatacccgtcatctttcaagttgccatagggtatagatctaaaaaataattaatctatttttattatatcgcattcacgatggtttatacgttccaaaatatcgatcaccaaaatcacctatgccaggattcataaaagcatctttattaagcccattctctattgaagaggtaatcagtttaattgtcgggtatgatgtcatgattctattaagaccaacaggagaagaaagaaaattaacaacaataatattatcttcaggtacttctctttcttttaataaatcgatagccttagctaatgatcctcctgtagccaacataggttcaaaaagtaaaatagttctctccgcaatatcatcaggtaagttcgaataataataatgaggaagttttgttaatttatccctttgaataagaatttttcccattggggaatcaggatacattcttcgatactcgccctctatactttctcccgcacgtattaccgaaacaccacaaagcttagtatttaaaatcgctccattataaatatccccaattggggtttgaatattatgagaggtataaggtagcaactcagatgctgcctctaataataaacgaatgatacgatcagaataaaatacaaactccgattgttcggctttacgattacgcgcttttgtatgcaaagaagtcaaatattgacttttcggcaaaacatgcacgtttttataattctccattataactccaactcatatttatagataaatgttattcagccgtacttggtctcaaataaacccgtgataattaacgtgcctatttagatcatcacatatcgattaaaagataaactctcatatccattctcttaatgcaataggccgaagctacagaatattttatatactactgctttattgtttaaatagttgtatttagcaacaaaatcaaaaataggttcttaaattcaagccatattttcagacttgtcttatttctctataaacctttatatggaaccctaatctgacttgtcagaaaaataaaaaatagacccgttatctttcaagttgcctctttgttggctgcgatgaccgaacattaaacctacataatgtaacaatttcttatagttaatatatacgataatacattttgccgaataaattgcagaaaactattatagctcttaccagaatcatcaagaaatgctaaagttgaaggatatgaatatttcaaatgagcatgccatatgatccaggaaaaacgtgttattcgtcgaatccagtctggtggttgtgcgatccactgccaggattgtagcattagccaactgtgtattccttttaccttgaatgaacacgagcttgaccagcttgataatatcatcgagcgtaagaaacctatccagaaagggcaaacgttatttaaagcgggcgatgagttgaaatctctttatgctatccgttctggcaccattaaaagctacaccatcaccgaagaaggtgatgagcagattacaggtttccacctcgcaggggatttagtcggttttgatgcgatcctcaatactcagcatccaagttttgctcaggctctggaaacatcaatggtctgtgaaattccgtttgaaacacttgatgatctgtccggcaaaatgcctaatctccgccagcaaatgatgcgcttgatgagtggagaaattaaaggcgaccaagaaatgatactgctgttatctaagaaaaacgcggaagaacggttagccgcgtttatttataatctctctcgtcgtttcgctcagcggggtttctcaccgaaagaattccgtttaaccatgacccgcagtgatattggtaattatctgggtttaacggttgaaactattagtcgtctgcttgggcgtttccagaaaaaccaaactctcggtgtaaaaggtaaatacatcacgattgaaaacatggataagttgtctgagttagtcggaaaaaaatctgtttcaattacctaatcttaaaaccagatcaccttattttgttgatctggttctcctctaacctgttcggtttgcttatattggtttatctttagtattgaagcgtgagtattgaagcgtgttttgtctagcctctgtgaggataccattatggcaaactatcaaaaccttttagttgtaattgacccaagtcaggacgatcaaccggcattaaggcgtgcagtttatatcgtgcaacgtaacggtggccggattaaagctttcttgcccatttatgatctttcttatgagatgaccaccttactctccccagaagaaggtagtactatgcgtaaaggtgttaccagccaacgcacggcctggcttaaacaacaagcgtattactatctggaagccggtattgatattgaaataaaagtggtatggcataatcgaccttatgaagcgattatccaagaggtcattacaggtaatcacgatttacttctgaaaatgacgcataaacatgacaagctaggctccttgatttttaccccacttgactggcaattactccgtaaatgtccatgtccagtatggatggtaaaagatcagatctggccggaccaaggctcggttgtagtcgcggtcaatttatccaatgaagaatcataccaccatgaattgaacctgaaattggttaaggaaactcaggaactggcaaatcaagtcatgaaaaatccggaaattcatttggtcagcgcttatcctgttgcaccactgaatatcgctattgagctacccgatttcaacccaagtgtctataaccatgctctacgtggccagcatcttattgccatgaaagaattgcgccaaacattctgcattgatgaaaaatatactcatatccatgaaggattaccggagagtgttattccccaaatgtgtgatgagatgaatgcgggcattattgttcttggtatcctcggcagaactgggctgtccgctgcttttctgggaaataccgcagaacatgtgatagaccatcttaaatgtgacattctgacaatcaaacctgatggttttgaatgtccaattaaagccgctaaagagtaataggatgataatcatctatttggcgataaaacccgaaacagattttcgtcccagtttttatcgccagataaacggttcaggcagtgtcacaccgaggatctcctcacgagctatacgccagaaaagacgaatacccgctttaacttgataagtttcttttcccaataccttaaagattagaccacactgatggggtaaacgactggtaccactcgctatacctgtttcagcatcgtactgaggagccatccgcgccagaatacgatcgtgatgaagctgaggtgtcagcaagatcacattgccaaatacatgaaacggccccatcacccccacactgttcaatgactgctttttgggctccagtacataacgctctgtaaacaatatcttgccatcaaaatcagttgccgtaatacgtgatgagtaaacatcaaatttaaacccctgatcagcaaggtggtatttgcgaccggacataataatttcagaataaataagggtggcggtcggatggatggttatttgagtatcggtaataaaccgagagccgctgtgaggtattaccggatcgggcatcatttccagatagcctccctgctctatctggatagtttgtacttgcgctgcgtagttattttccatcgaatgaatcttagtcgccgattgggtagtgacatgaccaaacgcctctggagcgacatgaatgtccagcgccaatctatccccttgcaagatacatcccgatgtggagatcataaatacgcacggcatctgcggcagtgcctcatcccaatacaatgcccgctggaccaaataaggaacccgacgtttcatttgtgccaaaatgctgcgatcaccacgccgggcaaatcccaaccgtagataaccacttttaccgacatcaccgcttgccatctggggcggttcatcctgaaatcgtgcaagttccggcgcgttgacaccaagattatttgcctgttgacacgcttctccaatattttgtggcaagcgggtggaagtcattgtgtcgcctgtaatgaatgggtaaacaggaaatcacgcatgatcatatttaccaacgtttcaacaccctcaccggttttgcaattggtaaggatataaggacgctgaccacgtacaacttgagtgtcatgctccatcaccgccagactggcaccaacataaggcgctaaatcaattttgttgatcaccaaaatatcggcctgtaccaaacccggaccgttcttacgcggaattttctccccttcagcgacatcaatcacataaatataaaaatctgccaacgccggactaaaagtgagtgtcagattatcaccaccactttcaatcaacacaacgtcgctgtcaggaaaacgcgcttccatctcctctaccgcagcaatattcatactgggatcttcacgcaccgcggtatgaggacacgcaccggtttccacaccaagtatcttttcttcatccaaaatgcctttcaaggtacgtttaacctgtttagcatcctcagtggtaacaatatcattggtgataatcagaggttttattccgcgctgaattaagataggggtgatcacttcaataacggcagtcttgcctgaacccaccggaccgccaataccaattcgggtaatttttttcacaaggatttcctcatacgattaagagggggttaaaagcgatatcagaatcaagttaattactgaataaccgggtaaatgcgctaacgtgcaatgccgccagaacatcggtcatcggtgcataagatgtcatctgttcaatccctcccttttccgcctcatcacaaaacagttcaatatcttgattcaatgagaacaagatacgttgaatgtcaatatgggtaacacgcatcaggcgtatagccgcgctgagtatcgtcattgcaacgccatattgatgcatgacgatcacttcacgtggagccgcacccaatgcactcatgacgaccgccaaagtaatcggataggtaccggcggcaatatcgctctttatttgtgctaaccaccatgcaattaatgactcaccggtgacttcaaccgccatttccgctaactttttccccatccgcgtgaccatagtgcgactttcttcatttaatttgcggttgaatattgcccaatcatgggagatagccgcatcatgctgcccactatttagcgcctgacacgcagccattaccgcgcggccatcactactcaccgcctgtaacaacgctgtacgcgtaaagtcgcttaatgttgccacgtcatatacgattttgctctgaatggccgattccaaaccgtttgagaaagaaaatgcgccaacaggcagtactgaatccgcaaactgcatgattctgattaagcggagagcattcattttagtttgatcacatgctggttcagaaatgtattatcgacatgaacgtgtgtcgcggaatcctctgcaccaccgaataacaggcgagcctctgagttgttaagagaaggcaatatctcttcacctttaacaaaggagtaaggcaatgcatgaaaaccgtgggttttcatgactgaatccataaccttagttgatactgtcagcggaatataaatctgattatatttaatcactgatttccaatgctggttacctaaagcatgaccaagttcaaagctcgttttcattaccgtctctacatctaatgacagcaatgatttcaggtgaataaccatcacatcacgcaagctcatttgaacaataactgccagtcctttagcttcgtcccacaataaaacgtcgccatcagacaatatctgatgacggtcaagggaaatacccaaatccaacccgttaagggtggatttacgacaacggcttttttgcgcttcccattgcgaaagcaccaagatatctggcgagatcccttgcaagcgatctcgccagaaaacatcctttttggcattaccaagaatctgttcaataacaatcataagataatcctctgaacgcatggatcggttaatccggccagaaaaatattctctgaccggcagcaaaaaataggttaactaaagaaatagcgctgattgagcgcgactgtcctgaccggttttactgtggcatattcaccattcaccctgacggcaaaggtttctgcatccacttcaatcgtgggcgtttcagcattacgcaccatatctttcttagagatagcccggcagttgtgcactgccataacttggcgctccaaaccaaggctctcttttacccccagttccattgctgcttgggatacaaaagtgacacaggtttcctgaagagttttgcccaatgcgccaaacatcggacgataaaatgtcggttgtggtgtcggcagtgaagcatttgggtcccccatcaccgcccaattaatcatcccgcctttgatgaccaacttaggttttacgccaaaaaaacgtggctcccacagcacaagatccgccatttttcccacttcaactgaaccgagcacatggcttattccctgagcaatagccgggttaatcgtaattttggcgacgtaacgtaatacacggaagttatcgttatgtgctgcatcctccggcaacttgccacgcgccgctttcatggcatgagcagtttgcatcacacgcaaccagttttctcccacccgccccatagcctgagaatcactggaaaacatcgacagtacgcccatatcgtgcaaaacattctccgccgcaatggtctctggacgtacacggctttccgaaaatgcaacatcagccggcactttgggattaaggttatggcaaaccataatcatatcaaacaattctgcctggctattgataccgtaaggcagggtaggattagtcgaactaggcaacacattcatctggctggcaactttaatgatatccggtgcatgcccgccaccggcaccttcggtgtggaaagtatgaatggtgcgaccttcaaaagcatcaatggtatcctcaacataaccaccttcattcaagctatcggtgtgcaccgcgacttggatatccatttcatccgctacgcgtaaggcattacgcaatgcggagttagttgcgccccagtcctcatgcactttcaacccggcaacacccgctttgatctgctcaaccagcggcatagccaccgcagcatggccttttcccaaaatacctacgttaaccggtaaactctcaaaagcacgcagcatgcggtggatatgccacggaccagcggtaacagtagtgccgttagtgccatcagtgggaccaacaccaccgccaaagaaagtcgtcacaccattggataaagcatgttcaacctgttgaggagaaataaaatgaatatgggtatcaatgccagcagccgtgaggatgagatgttcaccggatatcgcatcagtactaacaccaactaccataccgggggtaacaccattcatcatgttaggattaccacttttacctatcccgacaatgcgtcccccttttatgccgacatccgctttaataacaccttgccgggcatccaaaatagtgacgctggtaatcaccaaatccaagatgttttcgctggtcattcggttatccgcacccataccatcacgcagcgatttgcccccgccatagaccgattcatcaccgtaaccgcgcagatctttttcaatttcaataaatagattggtatcacccaagcggatcttatcgccagtcgtcgggccaaaaagacctacatattcctgccgggaaatggttggcatagtttattcctttgttcgaaagattttccgacgttcgtcaactctaccttgaatttattcgattctactacccggcatgtaaccaggttgtctccacaggctcatcaatagcaaccggacttttacccgcccaaccatcgactaaattattaaatccataaacgttttgtttcccaccaatcgggattaatgacacttcgatttcatcaccgggttcaaaacgaatagcagttgttgctgtgatattaagtcgtttaccaaacgcagccgcacgattaaattgcaacgctttatttacttcaaaaaaatggaaatgagatcccacctgaatagggcgatcacctgaattacgaactcttaattgaataaccggacgatcttcattaaaggagatcgggtctttagccagaatatacccccccaacggagtaacatcttctttattatttttttccatcggaaaatctccacgttaagacgtgagtcaagacataagttaatattttgtctagataatttttcctgctatttacaatttgcttcaacaattattgaatggggtcatgcaccgtgaccaaacgactaccatcagtaaatattgcttcaacctgtacatgcggaataagatcagcaacgccatccatcacatcctctttagtcagaacatgcctggaatcatccatcacttcttccaatgttttcccctctcgggcaccttccaatgcagccgcagtaataattgcgacggcttcaggataattgagttttaaaccgcgagacttacgctttaatgcgacatcagccagtgtatataccatgagtttttcgatttcccttggtgttaattgcataaaaccccctaatcgtcgcgatgcatcctgaaatccattggatatagaacttaatacaatttttccaacagactttattcaaaagctgctgtccctatccgaatattgatttatacccgtcatctttcaagttgcctctttgttggccgcactcactcaccccggtcacatcgttatctatgctcccggggattcgctcccttgccgccgcgatacatcttgaaatcaatagggtatagataatcttttagtaaaaaatctttgacacaaagagcataatatgtcaattaagatcattcttctcaatacaggttagtcctcttacctcttatttaagtttatccaaagtaatattacaagctgattagtatgcccctacttagtgaaaaaattataggtcatgaagtcagaaaatacttactgttttttttgacttctagcaatcacccgtaaggcgggttttacatttacagatttacaggtattccatatatgaataattcaacggataaaaaacgtgctgtatctcttctggttgttttgattgccgccaacatattggcttggatttgggcatttatcgctttccgtcatcatgcggttatgatgggagtagccctgttggcttacggttatggactgcgccatgcggttgatgctgatcatattgccgcaattgataacgtcacccgtaaattgatgcaacagggtaaatcacccattgccgtcggcgctttcttttctcttgggcactctaccattgttattctggcctgcttcgccatcgttctaacctctatggcgtttaaagatcaaatgggctgggttcatgactatggcggcattgttggtaccttagtttctgcctgctttctgctagcaatagccctgattaatttactgatattaaaaagcgtctatcagaagtttcaggagatcaaacgtggcagaaatctggctaaaagtgatttaactacactagaaacgacgccgggggggatcatgacgcgcctgtttcactcagtcttccggctggtaagcaaaagctggcatatgtatttggtcggttttctgtttggcttgggttttgacaccgctaccgaagttgggctattaagtatatctgccgccggttctctcagtggacttcctctgtggtcgttgatggtattcccggcgctatttaccagcggtatggcgctcattgactcactggataattttgtgatggtgggagcctatggttgggcattttcccaaccgacacgcaaactctactacaacatgaccattaccgcggcttccgttgccgtagcgctgttcattggtggattggaagcacttggacttattgctgagcaatgggatttgcacggcgttttctgggataccattgggacattaaacgataacatgggcaatgttggtttttgggtcgtcggaattttcattctgttctggaccttatcagtgatgaattatcgctggcgggggtacgatacgctggaaattaaataacaaacgcagaactcttcacataaccgtgcgatgtattacatcctgaaatgttgttatgctcgctatctaatgatagcatttgtgttactagtgatatcattgtgagaaaggttatgcataaacaaacgaaacagacaataacccttcgcttagatgaagggttaaaaacacgcattaaagcgttggctgacacgcaaggcatttctgcccattcgcttatggtacgttcaatcgaaagtgaaattgatactttggaggccagacaacaatttttacgtgatgccgaaaacgcttggttagaatatgaagccaccggtttacatttaactggcagtgaactttgtaattggctggatgcgattgtacgtggcgaggataaggagccacctgaatgccatctgtaatagtcactcccgcagcaacaagggatataaatcgtcttattgatttcttatatcaacgcgatacagttgctgcgaagtcggcacttagtatcattagcaaacacatccaagcactggaatctaacgtcttatctggacggccaacagaaatttatccactctttgagttaattatcccttttggtggtacaggctatatattgttatacagagaacttcccggaagtaatacgcgttacattttggctatccgtcaccagcgagaaatcaactataagcactaacttaagcattaataactaatgaaccgaaaattaagtaaataacggatgtaatctctgtctctcaatcaaaatatgattgagagacagcaaaacccaacccgagttttgtaaattacaacgataaaaaatcacagtgcacgcaggatttcctctacactcgccttcgcatcaccgaacaacatttggctattgtctttaaagaacagtggattttgcacaccagcgtaacctgtgttcatggagcgtttgaacacaacaacattttgtgctttccaaacctccagaacgggcatacccgcaattgggctgttgggatcttcctgtgccgcagggttaacggtgtcgttggcaccaataaccagtacggtatcggtatcagagaaatcatcattgatttcatccatttccagaacaacgtcgtaaggcacttttgcttctgccaacagcacgttcatatgcccaggcagacgtcccgcaacgggatgaataccaaagcgaacattgactcccttctcccgcagtttggctgtgatgtcatgtaccggatattgcgcctgtgcaacagccataccatatcccggcgtgatgataacagaagttgagtttttcaatagttcagcaacgtcttccgctgtggtttcacggtactcacccatttcctgatcatcaccggttgaagaaccatccgtaccaaacccgccggcaatcacactgataaaagagcggttcatggccttacacatgatgtaagagagaatcgcccccgaagaaccaaccagtgcacccgttacaatcaacaaatcattgctcaacatgaaacccgctgctgctgcggcccaacccgaataagagttcagcattgaaaccaccactggcatatccgcaccaccgatggaagcaaccaaatgccaaccaaataccaatgcaattgctgtcataagcaataacgtgaacacttgcagccctgtactgtccgttttcacaaaggtaatcaacagcacaaaggagatcacaagcgcggcaagatttaatttatgacgatttggcaacatcaacggcttagaggaaatttttccacataatttaccaaatgccacaacagaaccggtgaaggtaatcgcaccaatgaaaacccctaagaagacttctgttagatggatattttccatcacaggttctgcaaaactatcgtgagcaataaagctattaaaaccgaccagcacggcggctaaaccaacaaaactgtgcagaatagcaaccagctccggcatttcagtcatttcaactttatttgccagacgaataccaatcaccgcaccgatcaccatcgccagaataacccagacaacacttccggtatcaggcccgaaaatagttgcaatcaatgcgattgccattccggtgataccaaaaatatttccgcgtttagaactttcatgacgagataaacctgccaggctgaaaataaataaaatggcggcaacaatataagctgctgtaacgactccactcgacattagttaccccttagtccttacgaaacattttcagcatacgttgagtgacagtgaagccaccgaagatattaatgctggcaataagaacagcaataaatgagaagaaacttacccatccaccatcaccaatttgtaataacgccccaacgacaataatccccgaaatggcattagtgaccgacattaacggtgtatgcaacgcatggctgacattccagaccacgtaataacccaccacacaagccagcgcgaaaacagtaaagtgagataagaactcttttggcgcaacattggctaaccaaccgaacaagataaccgccaatgccaataaaccatatttcaaccaaggtgaaacgggtttcgccgctggcttttctgctttaattgatgccggttttgcctgcggctgggccgaaacttgaatgggtggtgccggccaggtcatttcgccctctttgacaactgtcacgccacgaataacaacatcgtcaaaatcaatattgatttcgccatttttctctttacacagtaatttcagcaaattaaccaaattagtgccgtagagttgtgaagattgtgttggcaagcgacttggcaaatctgtgtaaccaataattttcacaccatttgcagtaatcaccaatttatctgcttgcgttaattcacagtttcctccggtctgagcggccagatcaacaatcacgctacccggcttcatggattcaaccatctctttggtgataaggcgtggagctggttttcccggaataagtgccgttgtcacaatgatgtcaacttcttttgcctgttcagcaaaaagcgccatctccgctttaatgaaggcttcggacatgacttttgcatatccgtcaccactaccggcctcttcttcaaaattcagctcaagaaactccgcccccatgctctgaacttgttctttaacttcaggacgagtatcaaatgcacgaacaaccgcacccaagctgcccgctgcacccacagcagctaaacccgcaacaccggcaccaataatcatcaccttggctggcggaacttttcctgccgcagtaatctgacccgtaaagaaacgaccaaattcgtgagcggcttcaactattgcacgataaccagcaatatttgccatagaactcaatgcatccagcgactgtgctctggaaatacgcggcactgaatccatcgccaacaccgtgactttgcggtctgataacttctgcaataactcagggttttgcgctggccaaacaaaactaaccaacgtactcccttctctcattaatgctatttcatcatcctcaggagcattaacctttaaaataatatctgaacgccagatattatgacgatcagtaatttcagcacctacttgttggtaagcactatcctcaaagctggctaaatgccctgctccactctcaacaacgacattaaatcccaatttcagcaggtgttccacggtgttcggtgtggctgcaacacgtgcttcattggcaagtcgctccttcggtacaccaatacgcataatgttcccttcctaaagcctaagattaatgatgattattgcttgctacagtcaatttagcgactatacccgttatctttcaagttgcctctttgttggctgcactcactcaccccggtcacatagttctctatgctcccggggattcgctcccttgccgtcgcgatgcacctcgaaatccatagagtataaattaactttatgactattaactttattactgccatcagtgaaatctatcaacaaatattttgataacaaattgaaaatattatcgatgatagataactaatgcgtaaaaaaataactaactgcctatctcaatagggctattttaactggactacccgctatgttgataaaaacttatggcgctctacccttaaacttgcattcattcatactgatagcataaattcgtgggacattagctattattacatgtaataattatcggctatgtgatgcacaaccatgttcagcaagttacaactatttaatgcgcaaggtggaaggattttttatgaagctgaaaacaacgatcattgcagcagcggtactctcattaacgggtattaccactgttcaagcagctcaggagttatccccggagaaagcagcagagctgaaaccatttaaacgtattacagttacaggcccttttaatgctatttatgaagctgccgatgcggtttcccgtcgtgcagacaaaatgggtgcagatgggttttatatccaaagccttgacgatctaaataatagcggcaatctgcgcgttacagctgatctgtatcacaaagatgcagagaaaattgataattcacctaaatatcgtctgttccgcggcatcaaagaattacccaaagcagaagctgtaacgttggaaccattcgatacggtcactattaacggcttttacgacaatgaacccgatttgaatgaagccattgccaaagaagctaagaaaaaaggcgctgcggctttctttattgttcgtcaggttgcaatcaatgatggcggtaatcagacggtgacagcttatgtttataaagatgatgcaccaaaacgccaaattcaggctgatgaagccgttatcccggcagattccgattctggacgtattgcattggctgctggtggcgaatcagctaagaaagtagaaattcctggtttagcctcttcaacttcaaccagtaattctgttggccgcttctttgaaacccagtattctaaaggcaaacgctacactgtaactcttcctgatggcacaaaaatccaagaattaaataaagtcagcgctgctcagatggttccttttgattccatcaccttttcaggttactacaacagcatgcctgatgtttcttatgaagtggctaaacgtgccgcggctaaaggtgctaagtactatcatattacccgtgaatggcaatccagtggtggaacctccactatcagtgcagatctgttcaaataatcaaaaacaaaaaaaggcacacatgaccatcatatgtgctttttttatttgtaaagataataaagttcttcaaattagttagcggattccaactttgaaccgatacaatcaatggcgttctgtatcgtcactattttttccgcttcttcatcatcaatagttatcccgaaatgctcttctagagccataatcagttcaacattatctaacgagtcggcacctaattcctcgaatgtttgtgtattaagaatctgggtttcaggtattccaagttgttctgcaacaacacttttgacgcgattctctaaattttccacgctgtattttcctagatgtaccaattacaaggggaaacaggttgtttccccattcttcattaacactaagattaaatatttacacaaccgtcagatgcatgaatgctcctgtgaatctggcactttcagggataaaacataacagacgctgatctttcttcaatttacccgacttcataagctcatccaacatgatataaatagaagccgatccggtatttcctttcactgttaagttagtaaaccaacgctcttgttcaatactaaaattaatatcgtcaagaccctcggaaaatttcatgcggaaatattcagatgagtaatgaggcaagaaccaatcaatagattctgaagataagttacgatcagcaactatccgtctcaatggttcggtaagtgtgaatttaacgaccctctcatttaaatatctgacatcttgtttgatgcagaaaacagaatatgcaagccaatcagcctgactcatttgagcccaacctttcaaactgccatctgctaacttttctccacctgaatacatacatgtctcttgctcattagcaaaagagtaaatatctatccaatcaattcgtaatgaaacaccatcaggtcgaggtttattttcaagtaaagcagcgccggcaccatcagaaagcatccaacgcagaaaatctttttcaaaagcgatttcagggcgtcgttccagttctgcaacccgagcttcgttttcactctggaaattgcgggcatgcaatacagtggaaggtacttccgacgttgttgaaaccgcattacttgtcgctcctgaaagaacggacaaataagcatatttcatcgctgtcatacccgcagcacaagcaccggaagttgagataacttcacagggtttatttttgagctctccatgaaccatgacaccatgacccggtataatttgatcagaagtaccactgcttgctgccagactttgcatatcgtctaaagagaagtgttcatcaaccaaaccttttactgcctcagccgctagttgagcagatgtataagttgcctcaccggtctctggatccagtgcataatggcgatatttgatcccattattgcgaaggactatatgacgagatcttgatggacgaccaccaacaaaaccaaggacagattccattgtattattatctatcgggtttcccggcataaacgcggaaactttagtgatataaacgttgttactcatttacttatttatctccttatcatcatagcgggcagaaccagaaggttgttcatagtatttctgtaattcattaagacgttcttttagtaatggggaaagcaaacggcgcacaaccactgaaataggaaaaacaaccagtaccatcaatatcaaataggttacaaacaacgctaataaagagcgtcttacccatatccctcgtttgcccacacggcaaatcaacccagaccaaaatctaaatcctcgatgtgccgcacgttcaccgaaaataaaagcttggtcgacaaccgccgctcccatacctttcaacattggagcatcaactttctctttatccgttttgagcgctgccaacaatgcatcaccaaaacgtgtagcatctttaacgtcttcctccgatacacccgcccggggtaagttagggaatggctgtctttttcctgtcattagccatatcggggttgtgaatactgtcgcaaaaaagtttgctttatcaacaaagaccacgttatcacgcaaatacgctccactttcatgcaacaatcttttgacagtttcttgagctatcaaccacatgtttcggcaagcaataactgtcaccactggtcgaccattaagtaaacgctttccttcttcactcttaagaaatgccactatcggaggagccggtgataaataccaaacttggtagcctaatatgaccaaatcaaaaggttcttcgtcttccagattcaaaggcgctagctcaggcggatgtaactgcactgtttctgggaaaacatcaacaaatttagaaaacttccagggaaattcaaattcaggaatcggtttcagaataacttcacggatgtatatctcgtcagactcttgcaggggtgaaattaagctttttaccacctcgatcaattggccgctttgggaatacgacactacaagaacacgtttcatatgttctaacctttatgaatatttaatactgagccattcatcggcacctaaaagataaaaatttgaatgacagctatcccctaaccatctgagaatattttttggtatacgtacatataatcattcctgaaaattaaaaacatatatacccgttatctttcaagttgcctctttgttggctacactcgctcaccccagtcacatcgttatctatgctcccggggatttactcccttgccgtcgcgatgcatctttaaatccataaggtatacaagaaaaataagttaataaatcgcagagtaatattttcacaaacaatataaatcaaaacagtcgttgtcaacatgatttttttatttttatataagattagttttatatcacattgtggaaatttaattagttactgatagaaaaatcaatgaaaaatatattaacttgaatataaaattcacaaaatcaattaaaatcaaaaaaatatttaaataaaatcaataaattaaaaaaacattccatatgttttaatttgataagatatccataacattatgaaattacatatccaatagattaatttaataatctgacatgaaaacaagagatgattattacttagcagtaatattacataaaaaaatgaaaattagaggtaaaactttatttttcacaactattttattaaattttgagatcgatcgaaaaaattaaaataaaaattacttaattagtaataacaccatagtaattcatgcttattacctatttaccttagtacaataaacagcattataaaaataacgcatatcagcttataaaaataaattgcatctcaccacacccaaactcaccatcaaacaatgcataaattttatagttatttgcatagaaaaccattgcatccagctcatacccttcgtagaatccccccctatttctaggttcaatcagtctgtttctccgttctgtacagcttggaagcgataaaaacccgatacccagttcatctttatgatcaggataatgaactggttaataatgcagtttatgtcatattaggaacatatttttggaaaagaaactaggtctcacagcgcttactgcgctggtactcagctctatggtcggtgcgggtgttttcagcttaccgcagaatatggctgaaatcgccagcccggcagcgttaatgatcggctggggaataacaagtgtcggtatcctgttcctggcgatcgcactgttactgctctctcgtcttcgtccggatcttgatggagggattttcacttatgccaaagagggctttggtgaactaataggcttctgttctgcctggggatattggttatgcgcagtcgttgccaatgtttcttatctggttatcgtttttgccgccctgagcttctttactgataaagggggcattgtcatctttggtgacggcaacacttggcagtccctattgggagaatctattctgctctggttcgtacattggttagtactccgcggcgttcaaaccgcagccggaatcaacaaattggcgacaatggcaaaattgctgcctttaggtgctttcatcatacttgccgccattgctttcaaaatggacatctttcatttcgactttaaaggcatcgatttaggggttcctgtctggcaacaagtaaaagataccatgttgattaccctttgggttttcattggtattgaaggtgctgttgtggtgtcagccagagcgaaaaaacggacagatgtgggtattgcaaccatgctggctgtcgttgcggcgttaacaatatacatcttggtcaccctactctcccttggattagtaccacgacctgagttagcagcaatgcgcaatccatcaatggccaacctgatggtggggcttgttggctccgccggtgaaatcattattgctgccggattgattgtctccgtctgtggggcttatctgagttggacaatcatggccgcagaagtgccatttatcgctgcccaacacggctcttttccaaaagtatttaaccggcaaaaccgcaataatgcgccatcatcttcattgtggttcactaatggcgctgtacaactctctctggttttgatctggttgagtggaagcaactacaattcattgctgacaattgcatccgaaatgattttagtgccctatttccttgtcggggcatttcttttaaaagtcgcttttgatcgtagcaataaggggttattactcattgctgttggagcatgcatttatggcatatggctgctttatgcatccggtttgatgaatttgctattgtctgttgttctctatgcaccaggtcttattgtttttttgtatgcacgccgccaaaacccgcagaaaaatagcttacatctggctgaaaagctcactattaccgcattgctgataacagcaatccctgccactgggttgctaatcaagtaatcccgtcagatccagccattattcccctgtaatggctttctggattttcatatagcagtttgtttagtttttcgttgttctatcatatttttgttagtgttatctctaaaagtatgttgtaactaattttgttaatgcaactcgatgggtatgattatttaatcaatttttgtcgaattctaaaattattcaccccgtgttgaaggagcaaatcaagatgattttcaaagcgactatgttgatagatgtattcctgatcatcatcggcaaagatgtaaaacagatatctattttgtcctattggaatcgtctctgcctggagcattcgcaccgcaacaaattcagtacgaatgccctgataaagatcagatattctcctcaaattatttcagtttatcggcccaatcggcaattgcattgccgcctcgatcggcttttcggccggtagcgcatggctggcaccttcaatcactgcgacagtaacgcggttgccgaactcatccttcgcctccattcgagacgattcaggtcgaaacggatcggaacccgcctgtagatcgaggattggtgccgtcccgccagcccaccaatccttgcgattggttagcttacgcgccgaggactgactttttataacatcagaatgccacccctcaagccaaggcgtcgggtcattgcctgccgcgaagaaggcaagcttaagtttcgtcagccgctcctcacgggtagatttcggatcacttatcaccatgatcgcatccgagagctccgagggccaagatttcgccgccccagccaaaagtacgatgccacgcgtcatttcgggataatccgaggcaatcgtcttggcgatccaatggccataagcgtgccccaccacaattgccttacctccttccgccgcaactactgccgcaaaatcgtcggcaaagtcgtggaaagtcacattttccatcggaccagtcgaccccgagattccgcgtggttccggcagagcaacgcgatagccgcgcctcgccagtcgatctgcgagtggcgcgaattccgcggttccccgcccggttgaagcaatcaccacgagcagtggccccttccctcgcaccgaatattcgatcgatgccacgccattggtgacagttttctgctctgcttgcatggccgaagccggatgcgcgacggcaaacacgatggacaaaaagcctaatatcaagacgaactgtttcattttcctcccttacagggttaattgtgtgaagtgtttataccctatggatttcaagatgcatcgcgacggcaagggaacgagtgcagccaacaaagaggcaacttgaaagataacgggtatataacgtcaactaagataagcatcgctataaacaataaatatagaaagatcacattagaagactatagagtaatttaatccaggtgacttactccattagaataaaaattctcaaagagaaaatgacagcgagaggtaataacataaaaataatagaacaaaaaaataaattcttaagagtgataaattaattgtgatttatatcacaattaattttataaccaattattaatcaaaagatattcgcattaattagcataatgatttattacatacaataaatcacgttaatattaaaaaataatcctgtttaagaaataaatacagataaaagtcttaaatgcaatacattatcgagtcattctttggatttttcctaattaatcgctatgatcgcccggctttaccccaaaaaagacacagtttaagttatcgttgttgttatcgggtaaaagctatattccctacggatttcaagatgcatcgcgacggcaagggagtgaatccccgggagcatagataacgatatgaccggggtgagcgagtgcagccaacaaagaggcaacttgaaagataacgggtatagatatttacacgctgtattgacgtttatacagttcccattaaatcagtatttctattgccctgacgccatgctcgacagggttaggatctatttaaaatgaaagctaaactgattatttcatccttacttgcatcttctgtatttatttctgtagcaaatgcagcagacggaaaaatcaactttacaggtaatatcatcgcgaatgcctgtaaaatcgataccgactctgcaaatcaaaacgtaaacatgggaacaattagctcaaatgcatttagtggcgtagatagtaccgcggctgcaacaccctttagcattaagatgagtgattgcccaccagaatatactcatgcacaagttaaatttgatgggcagatagataatagaaataacaatctcctggccttatccaatgataaaggccaggaagtcgccgatggcgttgctattggtatctatgaagaagataactcaacgctgattcctttggcaaaagcttccaaatcccaggcttttactgatcaaaaaacagcagaattgaagttcattgcaaaatatgttgctacagctcaagcaattagcccgggctcaggtgatgcagtcgccaattttacgattgtttataactaagacaggctaaatttagaacggaactttattcacgttttgtctctaatagagaagtacagggcatggatgcccacaaaataacgcataaaaacacgataaaacggagatgctaccgtgcagtatcaacgcctattcacagtaatttttctatatattatcagtataaatttcgctatcgctggtgtcgtcattggtggaacccgtgttatttacatgagtgacaaaaaagaagcgtctatttctataagcaacccggagaaagatgcaccttacctaattcaatcttggatccaagatgaaaatgataatatgaagactccttttatcgttactcctccgatctttaaactcgcagcagaccatgaaaatatcctgcgtattgtaaaaacagaaagtaacctacctcaagatcgggaatcacttttttggttaaatgtaaagtctattcctacctcggtgaaatcaaatcagaatcaattacaaataacagttaagtcaaagtttaaattgttttaccgccctgcaaatttggcagaaaagtcaagtaccgcatacaaagagctcaaattccgtacggaaaataattcattgatcgcagagaaccccaccccttacttcatttcattctcttaccttaaagtagatcaacatgaaataaaacctgcgggcatgattaaaccctttagccaactaagctggcctctgccggcaaagaacataaaacaggtaaattggaaagcaattaatgattttggtggtgctactgccgaggaaaaaacaaccatttaataaaaccactacattactctacgccagaaaattaattatgggaaagtgctcacagcataagattaataagcaaccatacaatattgaacattcatggctcttattattgccatttataactgttggcgtacttttttacccggctaaaacttattctgaagattatttcaatattcatgctctggaaataggtactgattttggttcacctgaagacattgatctctctattttcacgcaagatgactatccgcccggtatttactgggtagatatttaccttaatagagataaaatagatactaggaacgtaacctttgtcacgataaataataaattgctacccaagctgacaattcagcaattacaagatatgggagtaaaaattgatagctttccagagctgatcagtttaccaccagaaacagagttgtctgatctaagtcaatatattccatcagcaagcaccaccttcaattttagtcagcaaagactggatatcagtattccacaagcaatattaaacagtcaggcaagaggttatgtttcgcctgaattatggcagcaaggattaacttcattactgattaactataattatagtggttcaaatacctggcaagataatccatctggttctacgcagacccattatctgaatcttcgaacaggtgctaattggcaagcatggcgcttacgcaattattctacctataccagtcgtgataagagttggaaaagtattaacacctatttacaacgagatattcacgcactaaaaggacaattaacgctaggtgacagctttaccccctcctatatttttgagggtgttcaattccgtggcttacagttagtttctgatgacaatatgttaccagacagcttacaaggtttcgcccctagtgtccgaggaattgctcaaagtaatgctcaagttacaatcaagcaaaatggctatatcatttatcaaacttatgtttcaccgggtccatttgtcattaatgaccttttcccaaccacaacaagtggaaatttggacgttattatcaaggaagcagatggtcaggaatatcgatctactcagtctttttcgactataccgattatgttacgggaaggaggcttgcaatattcgataacactaggccaatatcaatcatcaaataatcgtgggagagagcctaattttacccaaggcgcattagtctatggtttttctaataatatcactgcctacggtggtacgattttttcaaaagattatcaatccgttgctttaggatcaggttataattttggtatattgggttctctctcttttgatatcactcacgctaacaccgatttaccatctaatataagtaccaaagggcaatcctatcgttttcaatatgcaaaagacctctcattaacaggaactaattttactctagcaggctatcgttattcgactcacggtttttatgattttaaagaagccaatgatatagagaattccaataaaagcgactggcgttaccgcaccaataaaagaagcaaattacaactgcatattaatcaatctctgggaaattttggcagtttatatctgtccgcctttcaacaaaattattggcaacaacctggctatgaacgtaatatcaacgcaggttatagcaccaattataataatattaattacagcctgaattatacctatagccaacttccagatacgaataaaaatgagcagcttttttcattcagcatacagattccattagatcgctggctaaagaatagctggaccagttacaattttaataccaataaaaacaaagatatttcccaccaagtaggtttaagtggcacagcgctgcaagacaataatttaatttatagtttacagcagagttacaccaatcacggtactggcgctggcggtcatattcatgcggaatataaaggcgcttatggtcaacttagtactggttatagttatgatcgtcattctcaccaattgaattatggccttcaaggaggcattgttgctcacccatacggcatgacgctttcacaacatttgggagatacattggcattagtccgggctgatggcgctcaaggaataaagatccaaaataatgttggtattgctaccgattggaatggttatgcagttattccttatgtcagcagttaccggaaaaatcggattgcactggatacgcattcattagcagataatgtcgatattgacgttaatgcccaaaccgttattcctactcgtggggcattagtcctggccgattttaaaacccggataggtcacagagttctcatcaatctctattatcaagaaaatcctattccttttggtgcagttgtcacattagaaaaacaccatgacattgatgaagtaaatagcgctattgtcagtcatgaagggcaagtttaccttactggtttacccgatagtggacgattattcgttaaatggggctataaagatattcaggaatgtgtcgttaattacaacttaccggaaaaaactcctttatccggtatttatataatagcagctcactgtaaataaccacccacaggaaaacgctatgtttaatatttacaataaatttaaatattttctcattatcaccaacttattaattggtttgatagtcagttcttatagttttgccgctaactgccagtttgagaaaggatttaaaccagaaatcactcatctctcctttggaaccttatatgtgccaagagatcaagctattggcacaaccatttacgaatatcgtgcagatgaattagataataaaaataatatcttctattgcgatacaaacattaatacatcatggggatacacatcctacaaaagtgcagaatacaacaaggatgctgtttacgagtccggcgtccccggtgttggtatcagaataaatacttggggccccggctatggtatcgactggttaccccgtattgctaataaccctgtaagctgtgacaattctggtcgttggtattgtggtaaaacatggggttatctgacaattcagctaataaaaatagcaccaacaacaggttctggttttgtcagaaacgaacaattaattcaggcacgggtaaataatcatatcgtgcatacttaccgtttgggaaatacccgaattattactaaaagctgctcactgaaaaataacaacgttactgtccctatgggcgatatcaaaaaaagcgatttttctggcattaatagtatcgcaggagggaaggattttgaggttattttagattgtgatgatgatgtccagattcaattaatgcttgacggaaagaaagcaaaaaataacttatatcatgtctgggcgcttgatcaaaatgataatcgcacaactgcttccggtgtgggtatgcaaattctttacaacaaccaacctgtcattatccattcacaaataaatattggtaatagctattcaggtgggaagttatctatccctttacacgcccgctattttcagaccgatcgcaatattacccctgggcaggcaaatgtaactgcaacaatgactttaacttatcagtaataaatttatctgcatcagttatagaaaggttatttcttgactgatgcgctgttatgttattattttatctgaaaaatttttaagaaaattcagcagattacgataattaacacgttatgcattagtgataatagcatcaattgctgagagaatttctcctcgggaaatgacaacattacatataaaatcttttttctttattttattggcgtcaaggaatgtaatagccggagtaaatacataatatttatcaccattgatatcaactaccggcgtaatacgtttacgagttagttccatttctcctgttgaagtcagtggaacaattaatcttgttgataaattttcaaaataatcatgctgaataaccagataataaggccaaaatttattagattttgctgaaggattacgataaacatcaaattgcgacatcaaaggctcccaaaaaactcatcatcagtaattatccctgcacgttctaagaacttattaattacctgtatactctgcgcatcttccttttgctcacattttttagcttctacagcctgcgccaaaagttcatccagcgtagccgataagttcatattcaggctacgggccgcgtctaccagatctgttgtgaggtatacgttagtgcccttcttggctccaggccgcgtaacaattgtagatctcatagtatgacctcctatgcttaaagttatgcgcataattgtaatccaatgaacctaaaagaaacaaggggattttagtgtagggttttatttttgagtgaattaatctaagagctaatcttacggattacggattttcttagaaaggtttttcttccatcatacctttaatgctctttcctatcccttcattcatttaaatcttaatttattaatttacaaaaaatttattttatttacaaaattatgcttttaaaaatgtttattaagtttaaagttaaatttcttaatatttactaatggaaacaagttatgacgtggaaatattcacaaggcactggtgtacttacacataatggctcttttattgcaaagggctatagcggtcatggagctggaataaataatccctctatggaacaggttgaaggtgaagggccaattcctcgtggttattacagaatcaacggttattctaactcaataaccaaggttaccgtgatattagatcctattatgggaactaatacgtttggacgctctctttttagaatacatggtgacagacgggatggaacataccgtcaggcatcacatggctgcatcattataaacggctataatctcagaaaagagatagccaactctagcgatacaattctggtagtcgaatgaaaaaactgatcctgtttttaatgctagtttcatttaactcactggccgtggatcgccatattacagctaaaaatccatatccgaatttaacaccagagcaattgagcctacaaataaaacagcaaggtgcaagagcagtaattaaaaatatgccagaaggggataacggagaatggaattatataacagatcatattgcaagtggagatataacatggctcaaggtggctcctttacttgcaaagggaagtgatgcccattcatcagaaacgctatcaacagcattagcaactgcattacctaaaaacgtaaacggagtattatctattcttgatgattccaatgtttcaattagcactgattctgtttgtttgctctctacttctgtaagtttggaatcaaatctattctctgactttgttaatctggcgtcaaacttgccctctacttctgtaaatttggaatcaaatctattctctgactttgttaatctggcgtcaaacttgccctctacttctgtaaatttggaatcaaatctattctctgactttgttaatctggcgtcaaacttgccctctacttctgtaaatttggaatcaaatctattctctgactttgttaatctggcattaagctgttcttcacttggtttcttagacaaagtattattgattacatctaatttttgcatgataacagcaacgtcggtcttcattgtgccaacatcactgatgactgatttcagatcagccttcacatcgctcattgtggctttgatatgctcaacgtctgattcaagttttgctacacgagcttccaacatatcaccacctccaccaccattgccgtttccatacttcatagtattgggcaaatgtttatgactttcaatagttgctatatcattggcagagaattcgtaaatcttagccatcacttaccttccactttagatgtaacaacaaaataactctcatttacgtctatacccgttatctttcaagttgcctctttgttggctgcactcactcaccccggtcacatagttatctatgctcccggggattcgctcccttgccgtcgcgatgcatctcgaaatccatagggtatataactttgctatctgcgctgcctaattcccccgaatacagctcaccaataagcttataaacaccttcattgggcaagtgaaccctctttaatgtcattgatgaaaccataatatattggtctgtagacgtaaaaccagacaagtgaatgtatgctgtatcatttcccttatcttgatcatcaagaaccgatttatcatcaacgaacacgtcaattttagtgtaatacaactcatctttacgcaagaaaacgcctaaagctacattaagatactctacagatggaaaactatcagcatatatccacatactaggagggtgcatcacatcaattaacattccttgtctgatatgtaccgggtaagcaaatgatattttctctaacgtcatgatattcctcatatgtttactgctgcttcacattcgatactattgcttctgtaagaacaaatccataacggcaatctccgtttggtggacaggacttaattaaaacaaagtgctggataaaaaaccagcactttgtcaataacctgagccacctttagtcttctttgatcaggaagcaatttgctccatcgtttgcaaaattctcttatccgagaccggatatggcgtgcccagttgctgagcaaacaagctgatccgcagttcttcaatcatccaacgaatctcttgcacctcaggtaactgtttctgttgcagtgataatttcgccagccattgctgccactgttgctgaacattttcgacacgccccatttgcgctctatctctgtgcggatcaatcgccaatttttcaatacggcgctcaatgccttgcagataacgcaggacatccggcaaacgtttccaaccattagtggtaacaaaccctttgaaaatcagaccagaaagctgctctttgatatccgataacgccaaggccagcgaaatatcaattttccccttaaggcgtttattaatagcaaaaatggtggtgagtatctgttccacttgcttagctatttccacgacagtatcgttcaactcagcccgaactttgtcctgtagctgaataaaaccttgctcattccaagcgggcccaccattcactgtcatcaatttatccacaccacaagagatgcaatcgtcaatcaaatccaataccttgccataaggattaaaatagagccccaatttggatttattcggcaatttctcatgtaagtatttaattggtgagggaatattgagcaacaacaggcgacgggtaccttcccacatggcaattttttgctccggttcggtttcaaacaatttgataccgatactctctttttcatccaccagcgctggaaatgctttgaccgagtaaccaccacgtttctgctcataccgtcccggtaattcaccaaaactccaaatgtgcagcccactctgttcaattccatcatcagcaacagcggaaagtgtctcctgaactttctctttcaagcgtaatttcagtgcagataaatctttaccttccgcgatagtccgattcttctctcctaccactcgaaatgtcattttgaggtgctctggtacttgctctaactgccaatcatcacgtgacaccgtaacacccgtcattcgccgtaactctttctcaaagctatctaacaaggttgattgcggttgaggtacccgctccataaatgcctgagcatagtttggtgcagggacaaaattacgacgaaccggtttcggcaatgatttaatcagcgcaacaaccagatcataacgaataccggggatctgccaatcaaacccttcatccttaacctgattcaacaccggcagcggaatatgaactgtcacaccatcagcttgcatgcccggctcaaactggtaactaagccgtaatttcaatgccccctgataccagtaattagggtaatccagcgcactgattttatcggcatcgcctttgatcaacatatttttttcaaaattaagcaagtccggttgctctttacctgtcttcatccaccagcgatcaaaatggcgagcagaaaccacatcctgaggtagccgttgatcatagaaactaaacaaggtttcatcatccaccaaaatgtcacgacgacgggatttatgttctagctcctcaatttcctcacgtaatttcagattcgctcggaaaaatgcatgtcgagtttgccagtcgccttccaccagcgcatggcggataaacaactcacggcagagcattggatcaattttgctgtaattaaccagacgactagccacaattggcaaaccatataaagtgactttttccctagccattatcgcaccctgagatttttgccagtgcggctcgctataatgatacttcaccagatgcccggctaacggttcaacccattcaggttctattcgcgcagcaatacgtccccacaagcgactagtttcaaccaattccgctgccattgaccacttaggtggtttcttgaataagccagaaccaggaaaaatagcaaaacgggcattacgcgcaccagtatattcctgtttatcggtatctttttggccgatatgagataacagcccagaaagtaacgcagtatgaatacctcggtaatctgcctcctgactatttaccgacagaccaatttctttcacaacttgtcgtaactgggtatatatatcctgccactctctgactctcagatagttaagataatcttgacggcaaagcttgcgaaattgcgaagaggagagtgccttttgctgctctttcaaaaaatcccataatttcagaaatgcaataaaatcggagtctttatcagcaaatcgacggtgtttctcatcagaagcctgctgtttctccagtggcctctctcttgggtcctgaatagatagcgcagaagtgataaccatcacttcacgtacacaaccatgttgacgagcttccaataccatacgcgccagccgaggatcaaccgggagctgagcaagctgtcgccctattgatgtaagacggtaatgactcttagccattgcgccttgatcaatagccccaagctcctccagaagccgaacaccatcctgaatattacgtttatcaggcggttgcacaaatggaaatgcactgacatccccaagaccaattgccgtcatttgcagaatgaccgatgccaggttagtacgcaggatttctggatcagtaaactctggccgagaaaggaaatcgtcttctgaatacagccggatacagatcccgtcagatacacgtccgcaacgcccctttcgctgattagccgacgcctgtgatatgggttcaatcggcaatctctgtactttcgtgcgataactgtaacggctaatacgtgcatacccggtatcaatcacatatttaattcccggtaccgtcaacgaggtttctgccacgttagttgccagcacaattctccgccccgtatgtgactggaaaatccgattctgatcactgttagaaagacgcgcaaataatggcagtacttcggtatgacgcagattcagtttattcagcgcatcggctgtatcacgaatctccctctctccactcataaagatcaggatatccccaggcccttcacggttgagttcatcaacagcatcaataatggcctcaagctgatcccgctctccaccattatcttcccccatgacaggacgataacgcacttctaccggataggttcgaccagaaacttcgataattggcgcatgattaaaatggcgagaaaagcgctcaggatcgatagtcgcggaggtaatgatcactttcagatcgggacgttttggcagtaattggcgcaaataacccagaataaaatcaatattcagactgcgttcatgcgcctcatcaataatgagcgtgtcatactgtttaagtagcctgtcattttgcagttccgccagcaaaataccatcggtcatcagtttaatcaacgtgttatcacccacatgatcactaaaccggactttataaccaacagcagaacccacggaggtttccaattcttccgccagacgattggcaaccgcgcgagcagccaatcggcggggttgagtatgaccgataaggccctttattccccgacctagttcaagacaaattttcgggatctgggttgttttacccgaaccggtttcaccggcaataatgacaacttgatggtcacgaatagctttgtagatatcatctttcttctggctgacgggcaagttttctggatatttgatcgttggacaagcagcctgacggttaatgattttctgagactctttcacttatattgatccttgtaacttcttaactttactgattagccagcttttattgatgacgcagttcttattgataacatggttcttattgacgactatagtagcatatcctatttattggcaataatttcagctgatatttccaccacgttatatcaacgcggataaaagtctttcaataaatttgaatcctattctctaaatattgatctgttaccataagtcaataactcataaaataactatatcgtgattaacaaatgaattaccaaaagttaacttaaggaataaacatgagtaaagttctggttcttaaatccagcattatggcgcagcattcacatactaaccaaatggcagatttcttcattgaaaagtggcaaaccaatcatgccgatgacagcattacagtacgcgatctgactgcacaatccattcctgctctggataatgaactggttcatgcattgcgtccgagtggcaatgaaatgaccgctcgccaaaaagagacgttagcactatctgacgaactgattgcggaattgcaggataatgacgttattgttattactgcacctatgtacaacttccacattccaacccaactgaaaagctattttgatatgatagcgcgtgctggcgtgactttccgttataccgagaatggcccagaaggtctgctaaaaggcaaacaagtcatcatcctgaccagccgtggcggcatccataaagatggccccagtgatctgttagtgccttatctgcgtctgttcctaagtttcattgggctcactgatatagagtttgtatttaccgaaggtgtcgcattaggccctgatgccgcaaatcaagcgcaacaaaccgcccgtgaagttttgcaagcaatagcttcctgatagccacttttttgttcatagttcatacatttatattgctgttttttgcgcgtcattcgacgcgcttttatttcttcaaccacttaccattaataccacgcacatactcaccaggttcagctctattcaccaatttttcgccagtaagtttagccacttgctctgtagaaatattattgccagccgcaatttctgcgtattttttctcacgggcttgattaatttctgccaccaaagcttgtgcctgattatctgttttcactatagccagataaccactgaaagtttcaccaaccaatcctttctgctttgcctcattcagagtcattcctacaacggaagagctgaacaatacactagccaataacaatattcccgtacctgttctcttcatcatgccaaccccctagaataaacccgtgttattcttgagcatctcttcaacttgcctgtctacttttatctgaatttcatgctcaattttgacattcatattaatattaatgggcttctccggtgttgccacttcaaggcgtatacaacctgacagcattaaaggccccattgatagtaagaacagcttcattccagtttgttttgtcatttatcactcccatttaatacagagatattttgctgtaaccaatcttcaagattgttgccaaaccgtaagctgcgccataagtgaaagatattctcttcatgatggtaattcagcttgacttgccgttttttatctcttaatgaattaacaccttgaatttcagcgctaagtgccagaatccctaaattatcaagactgagctgcgcccgtaaacgactgatttctaaatagcgtaaccaatccatagcggcaccagcggaaatattatctttgttaatggaatctaccgtgtctttatccagacgtaaggtcatatggtcgatattggtaatctgaccttgctgaactatccaacgttcattattaataaacaacggcaattttccgctgattttgccggatatcgcaaattgtttgactttcaacacagtaagaaggcgacttaactccaatttatcaagcgccaaaatagcaggatgatgctgaggaagccttaatttatctaagttaatctgtccatccaatatacctacattcacattagtcaattccagcggtttttgttccgatggtggataaaatccctgtaagtccgccgtcaagttacgcatttcaaacaggttattaatcgttttcactcgtagttgaaccggcgatttaacaccaaattgccagatactctctttcagccgccacggtaagacaaaatcaagtccactgatttcaccctctttaagccacatgctgccattttttactacccagtgtccccccgcaacaaaaccttgccctcgtgtggcagaaaaagcggcctgcgcataaagatcacctgatcgtaagtttatgcctaaatctttaggtaccaacggctgaaatgcaagtaaggattgagtaggccaacgcgcttcaccacgcaatcttgctccatcccaacgactgtaaaaagggatcggaccaatatttcttgatgaaagatcaccattaacaataaagttattcgggctttctcctgtcaattttgctgtcagctcagcagggggcaaaaagccaccggaccgaaatgatgttttcttcgctgtcagccgtaactcacccttaaaggcgggcaatttctctgaacgttgccattccaatggttttgttaattgtagacgcggcgtatccacccgaatcataccgtgcttaatcacattaaaaccggtagtcatttcgttgacgttaatcaatgtgtcatgccaacgcccttttccaacgatatcccatttagcctgtagtggcggcaaatagccatctccccaatagttccaacgccaatagcctttatccggcataaaatcctcggcatgaccatctagatgcaaacggaattttccccagtcacggtgttgcgcattaacaatcgcctgtaaccgacccgtaaaaccttcacgtgtcagataagttcccgctaacggtgatcgggcatctttaaccataaactcatcagacaatcgcccccaaacccgaaacaacgaacctgactggaaagtcattttcggattaaccagcggaccatcaattatcgcaggcaatgacatagccatcatcatatcctgcacattaatctgacccgttaattgcaaaggaagttgcgtatttaatgaatttatccggcccggttttatcgttaacacaatattcgctttaccacgtttaccctgagtgaccaaatttatacgaccactcattagcaggttatccaacccttgttgccaatgagcaatcttaatattcactcctcccgcaagaggttgttccgcactcgtccactgccatttaccatcagtaatatcaaactggtcttggttaaactgccaaggcaattcggccaaaggtactgttgtcccctcttcgccgataataagtttgccggatgtccctcgccaacctaacttgatattcagcgggtgcgcatattgcctggcaataattttaccttttacatcaccatgaggcggtaatttgtccacattaagaggtaatgtcatttcaccattaaggctgatttcctgttctggtaatttaattgccagttggtcaataactagcgattccttaccataaatatgcgctgacaatttaaccttcttcccctgataactgagttcttgcccctgagaagaggaattgaattctagtcttccagcaaaatcttgccagggatgaaaagaaagattttccacggacaaacttccctgtggaataagagctaaaatatcagcaacagacagtggatcatggctttgtgtcgatttaggtaactgatttaggcaattgatatccccgctaatatctgcggcatttaatcgccaatgataactgttatctatctctgaatatgggtaactaacagataatcgcgatacacgaataagcctgcaatccttcacctgcaatgaaatatcatccaattgcaaagccccatttttccattttggttgtttcaatgaaaccatcatacctggaggtaaccagcgaccagtgaccttaggtaaccaatgaggaatagaaaaccatcccactgctatcagcaataccgataacatcagtatggtaatgaatatttttaaccctttggttatcaaacctttacctctccttattaagccttagatcggttacttctatacccgttatctttcaagttgcctctttgttggctgcactcgctcaccccggtcacatagttacctatgctcccggggattctctcccttgccgtcgcgatccatcttgaaatccatagggtatattgttattccataatttagcagacacgtcttaaactaagacattgattattaagaaaattatgttgaacatataggggaacaacaagcaatacacttatagagttaattaatttattggtttatttaaccctttacgtcagcaataatttaagcccaaaacaatttattagctacttaaattatagcggagataattccatgaaattagtcgtttacagtaccaaacagtatgaccataaacatctggagcaggtcaataaaaagctcggatttggttatgatttcgagtttttcgatttccctctcagttcaaaaacggccaaaaacgctattggtgcagacgctgtttgtattttcgtcaacgataatgctgaccgtaaagtgcttgaagaattagctgaaatgaatataaaaatcctcgcattacgttgcgcaggttttaataatgtcgatctagatgcagctgaagaattgggtattcaggttgtacgggttccagcctattcccctgaagctgttgctgaacataccgtcggattaatgttgtgcttaaaccgccgtatccaccgagcttatcaacgtacccgtgacgccaatttctctcttgaaggcttaattggcttcaatatgcacagccgtacagcgggaattatcggaaccggcaagattggtattgcaactctacgtattcttaacggatttggtatgcgtctgctagctcatgatccctaccccaatcaagctgttttgaatctcggtgctcaatatgtcgatctggatacgctgtatgcacaatccgacgtcatatctcttcattgcccgttaacaccagaaaatcatcatctgctgaatgaagttgctttcagtaaaatgaaaaacggcgtaatgatcatcaataccagccgaggggctctaattgattccgtcgcagccattaacgcattaaaacaacaaaaaattggcgctctgggtatggatgtttacgagaatgaacgcgatctcttctttgaagataaatctaatgacgtaattcaagatgatatttttcgtcgcttgtcttcgtgtcataacgtgctgtttaccggtcatcaggcatttctgacagaagaagccttaaccagtatcagtgaaactacgctgagaaatatccagcaattaatcaacggaaaaaattgcccaaatattgttagtaagtacccttaaaataatatataggagataaacatgaaaaaaatactacctttggcaacagcaactttattgttagccacattccaagcgtctgcggtagaaaacgtgtcagttgatgatttacaacgtcacaaatttgttctagtgagcgttaatggcgaaggcgtgaaaaatcaagatggtcgcgtaccaaccattgaattcggggaaaaaatgcatgtttctggttccatgtgtaatctcttcatgggtcaaggtaaactgaaaaatggtgtactgaccgttaaaaacctggccagcactcagatgctttgctctgatgaaaaattgaatagatgggattacctgattggtcaagtattagccgatggcgttaaggtgaagttgaaagatcaaaaactgacactatctcaccccgacaatacattggtttataaagttaagtaatcaaaaaaatcatttataacattagcattaaacatttagcagagtgaaattccttgaatggactcaagattaaactctgtttatccaaatgttttatgtgttaggtgccggaaattattctccggcacttccagatataatatctaaacaataaatttaccactggcattaaacttttaaacattataggagaaccaaaatcgacataaataaatatagataatataacttatttttaacttattccttctaacttaaataaagagttatacactttttacatttaataaatagtttactaactaaataaaaggaaataatttatgtccaatattgcactgactgatattcaatttatcaacctcatgaacgaaatgcgccaacacgcaagacatatgttaagtggttctaaaactgaaccatttatgccatcaacacctgaactccaggcatatgcaaatatgcttggggaacaatacgaaagtatagatgttactgaaaacaaggaagtagatggtattattaatcaattgaaagattctgtgaaatctggtgctaattcaacagtaaacgtctctaagacaagtgtaactaatagcacacagaaatatcaggaagcgattgccactgatccagacaatgcagaccaagactggatcgataacatgaataaatctcgtcaaagaaccaaagatgagaacaacagacaaattgatacaagttacgataaagccattcaattcggattacaatttcctaatgccagagcagcaatacaaagttttatggaaaaaactaatgcattcttctccagtttatttggcagactttcaaattttatacttgatgccgccaggcaactctctgaatggataagcagagcatgggaatcaattaaatcgttctatgataaaattaatgtttggatttccggcgctttgtaattaattgataatggttcgagttagttcgaaccattatatacccgttatctttcaagttgcctctttgttggctgcactcactcaccccggtcacatagctctctatgctcccggggattcgctcccttgccgccgcgatccatcttgaaatccataaggtatattcacctcagatataacctaagtaaattaattacttattaggcagtttgatcctggaaataattgccagtctatccatataatattccgcatgaccccacaaccaactctgctctttactaacatcatcttcagctaaaatatttcttaattcacaggtcataacatcatagccataaacataaagcccaaactgtaacgcctcatacattctggcttgccaaaaagaggtgccttctattatttgactcatatttgaagcaacaacatcataggctttaatcagatagtggaaaaagattttagcggccaaatcacttaatgccgctttatgttgtggcttcctcgttcgccacacaagtatctgcgaagcgagacgacagttaagcaccaaatcacttaatataataactttgttgtaataaacgacttcttttgtttcgtcactaagtagcgctaattcaaagtagggctcatctatatcatccaaatctaacctgttatcaaccctgatcaaccggtaaccaggtggaaaaatgagttcatccacatcatgcacaatattagtaccagaggaatcaagagcatcatacagaacacgattgaactctaactcactcaattggatgaaatcattggtaatcttttctatgtttcccacatgtattggcatactttatgcttcctataatagaccacaggttcaattacctaatggtaatagtatagatgcaattatatatatccgtcatctttcaagttgcctctttgttggctgcactcgctcaccccagtcacatagtttgctatgctcccggggattcgctcccttgccgtcgcgatccatcttgaaatccattgggtatacaatcaacctttagttcatttttgggggatatgcccactggttaacttcgctcttcccaacctgggaaacacagaaaataatttattaaattataatgagttaaatcattatcaaggtttattaataatatgatcttcccattctacaacatcaatttcccgtacagcgatgtgcctaaccgaaattctttcgctatgcattgctgatttagaacctttaatcagaggatgccacggtaataatggcttcccttcttctagcaaacgatatgcacaagttattggtaaccatgcaaaagtcggcaaattataacgggttaatttgatacaatccggttcatatctgaaacgatcttcgtaatttttacattggcacgtttttatattgagttgattgcaagcaacattagtaaaataaatttcatcggtatcatcatccatcaatttatgtaaacaacactgcccacaaccatcacataatgactcccattcttcatccgtcatctgatctagggtttttacctgccagaaaggctgagacataacttctactattccttatattattcaaatcactctggtagtgagtgaattatcattcagagtaacctttaacacatcaccaggtttcagtgcgccaacaccttccggtgtaccagtgagaatcacatctcccggccgcaaagtaaaaaagtgcgacatatggctgatcaggggaacgatgggtgtcaacatatcgttactattaccgttctgccgtagctcattattgaccgtcagtgaaaactggacattctgtggatcaccaaagtggcttattcgaataaacccagatatcgggcaagagccatcaaacgccttacttttttcccacggttgacccgcttgcttgaatttagattgcaaatcacgcaaggtgagatccaatgcaacagccaaacccgcgatagcggcaccaactcgctcttcatttgcttgtttcaacggcgtaccaatcagtacagccagttcaacttcatgatgaacaacaccaaaatcctttggaatggcaattggctgatgtatatcacacagtgcagtttccggcttaataaaaacgactggctcttccgctggcttagaccccatctctttaatatgtttagcgtaattactaccaacgcaaaccactttattgacaggaagatccagtaatgccccctgccagtctctgtgttgatacatattcgtttctcactctggtttatacccgttatctttcaagttgcctctttgttggctgcactctctcaccccggtcacatagttttctatgctcccggggattcgctcccttgccgtcgcgatccatcttgaaatccattgggtatattaggcaacatacccataattatagcacttattgccccatcttatcggccaccacgccaagcgtgatcgcaaaatagggaaatctttcctttgagaagcaaaccagattgtttccctttaaaagcacaacttattgtgaatattgtggtggttaataaaaccgcgccgacggttaattttgctcatcaaacctctggattcttcttatttttccatctggctcagatgtgcattcattaagttttcaaccggaggggggatttgcaggtaaaaaccctgttcaattaacgatatttttaccttttcgatgtcagcgcctgctagcttttttctgtctgccagagagatcatcattgtatattggggctgtccaaaacttttcagtaactcttcgggaacacgagagaaattatctcttttttcaacataaagatatgtttgctcccttttcggactgctgtagatcgcacaaatcattataataaactcttttaaattcaggtcacaacttgcttgaataattcagtaattataacatgtttattgtatttctaaatatcgtatcccagggggtgttctggggggatctcaaatttgctgaatctgagtcaggcaggatagatgtcacagtcgccaattgagctaaaaggcagtaattttacgctttcggttgttcatttacacaatgaccaaccagaaatcattctacaggccctacaggaaaaagtggaacaagcaccggatttcctgaaaaatgcaccggttgtcattaatatctccgctctgccggcagacgctgatctgaaagcactgcatcacgctattgattcagcaggattccgtattgtcggaatgagtggttgtcgtgatgagcaacaacgcagggcggtaataaaagcctccttaccactactgagtgaaggaaaaaaacaaaaaacctcggcaaaggaagataaaccggccgaacccgcgattaaaaaaacccgtgtaattaatttacctgttcgctcaggtcaaaggatttatgcccaaggcagtgatcttattgttaccagtaatgtaagcgccggtgccgaattgattgcagacggcaatattcacatctacggtatgatgcgtggtcgggcattagccggtgcatccggtgatcaggagtgtctggttttttgcacccacttaaatgctgaacttatctctatcgcagggcaatattggctcggcgataaaatcccgactgaattagcaggaaaagccgcaaaacttagcctggtaaataatgaattaactattgaacctttaatctagcccttttaataaggaatcacttcatggcacgcattattgttgttacatcaggtaaaggtggcgttggcaaaaccacttcaagcgcggccattgctaccggccttgctcaaagaggtaaaaagaccgtcgttatcgattttgatatcggcctgcgtaacctcgatctgattatgggatgtgaacgccgcgtagtttatgacttcgtgaacgttatccaaggtgacgtctcgcttaatcaggcattaattaaagataaacgtaccgagaatctttatatcttgcctgcatcacaaacccgcgataaagacgctctcacctctgaaggcgttgagaaggttttagttgatctggataaacaaggtttcgattttattatctgcgactccccggctgggattgaaagtggcgcgttgatagcactctattttgctgacgaagcgatcatcacaaccaatcctgaagtctcttctgtacgtgattcagaccgtattctgggtattctagcttctaaatctcgacgagctgaacggggtgaagatccgattaaagaacatctgctattaacccgctataacccaggtcgtgtaagtcgtggtgatatgctcagtatggaagacgttctggaaattttatgcattcctttaatcggtgttatcccggaagatcaatctgtactgcgttcatctaaccaaggagaaccagttattctggatacagaatccgatgcaggaaaagcgtatacagatactgttgaacgtttattaggggaagaacgtcctttccgcttcattgaagaagagaaaaaaggcttcttaaaacgcctgtttggggggtaaaacatggccttgctagatttctttctgtcgagaaaaaaaacgacagcaaatatcgctaaagagcggctgcaaatcatcgtggcagagcgtcgccgtggtgactctgaacctgcttatctgcctgatatgaaacgggatatcttggcggtaatctgtaaatatatacaggtcgatcctgatatgctctctgtacaatttgaacagaaaggtgatgatatttccgtgctggaactcaatataacattacctgaggcagaagaaactcaaaaataacgcagataaacagggctgttttatcattaccgccatcaaagtaaccaaactcattatgtggcagtctgagatggggtaaccctaacgggaacccctttctcgcgctttagcctggcatcaggctaaggccctgatatggattaatcaggatagttcgccagaatctctgcaactggctcagccagcaattctccccgccatccactaagcagttcaggtttgtcatttaattgtttcaagttccagtgaacactaagtaattgattaatctgacgacgagatgccaataattcagaattaaatctatgctgttcactgacttgatggatcagcgccttaatatccttaaatgctttgcgataacccggttgatcaatcaagttcgtcattggcggcgggcattcactttctggaatatttccactttcagcaaccattgccaatagacggcgaccatgacaacgaatctcctgcccgcttaaccctaacgcatccaactctgccagagaagttggcatataacgcgctacctgccacaagttttcttcacgaatgacgaagtttacggctaaatcgcgttctctggcctgactcaaacgccatgcagccagttttttcaaacacgcaagctgttggggacgtaattgacaaatattgcctatctgtttataagcagattccggttccaatatctctttacggcgtcgactgataagccgacactcacccgtcgcagcctccatatatccggcctgcgcggttgcagtcatcaagatatccgccaaaggcaacagataataaacatctgcggctgcatattcacactgtttttcgcttaacgggcgagcaagccaatcagtgcgagattcgcttttatccagctcgacatgaatatattcagccaccagcgcggcaaagccacatgaaagcgggtgcccaataaaagccgccaggacctgagtatcaatcatcggttctggcaagcattgaaaagcattcagaaaaacttccaaatcttcactgccagcatgtaacagcttcaatatttgaggatgagtaattaactcacggaaaggttgccagttggtgatattaagtggatcaatcagagaaagttgttcgccatcatacagttgtatcaaacctaattgcgggtaatacgtccgtgtgcgtacaaattcagtatccaatgctacttttgagtatttttttgccccttcgcaaacttgttgcaactgagcatctgtggtgatcaactgataattcaaaacatagttctcttagccattcatggaataagcacgacaacgccggctaataccggcgttgtcgtgcttatcaatattatgaagaggatctcaggctatgctacattcctgaccttttcctcttcatcacgcagttccctacgaagaattttacctacattagacttaggtaattcatcccggaactcaatgatctttggtactttataccctgttagataacgacgacaatgggttttaagttcatcctcggtcaaaccaggatctatccgaaccacaaatactttgacagtttcaccggaactttcgcttgatacccctattgctgctgactctagcactttagggtgagctgatacaacatcttcaacttcattaggatacacattgaaaccagaaaccaaaatcatatcttttttacgatctacgatatgaatggaaccctgttcattaacattcgcaatatcacccgttgctacccaaccatctttcaacacttcttctgttgcatcaggacgattccaataaccggccatcacctgtgggccccgtatccacaattctccctgctggcccatctctacctcattaccatcatcatccacaagtttgatttctgttgaagagaccgggaaaccaatactgccagtgtaatgtttcgaattataaggattacaggaaaccaaaggtgaacattctgtcagaccataaccttcaagcaaattggtgcctgtcacttttgcccatttctcagcaaccgctttctgtaccggcataccaccaccaacaaccagacgcagcgtagaaaaatcaagcttcttaaattcttcattattcaaccaggcgttaaacaatgtatttaccccggtgacagaagtaaacggataacgacctaattctttagctgtacccgtaatatcacgcgggttagtaatcagaagattgcacccacccaagtaaataagtaacaagcaattcaccattaacgcaaatatgtgatagagaggcaacgccgtaacaatcagctcttggcctacacgtaataatggagaataaaccgcttttgcctgttcaagatttgccaaaatattacggtgagtcagcatagcgcccttagctacgccagtggtgccaccagtatattgcagaaaagccaaatcattaccgttaatctctggttttacatattgcatgcgataacctttctgtatcgcacaacgaaatgaaatagcatcaggcagattatacttcggtaccagccgtttgatatatttcaccgcaaaatcaaccagcgtacctttaggacgagatagttggtcacccatacgcgtcaaaataacatgcttaactttagtattaaaaacgatcttttccaatgtatgggcaaaattggagacgatcacaatagcggaagtgccgctgtcattaagctgatgttcaagctcccgtggcgtatatagcggatttacatttacgacaatcatacctgcacgtagaacaccaaacagtgcaacgggatattgcagcaggtttggcatcatcagcgcaacgcgatctcctttacttaatcccaaaccattttgcaaatatgctgcaaacgcccgactacgctcttccaacttacggaaggtcataatctcacccatattgataaatgcaggttgatctgcatagtgcgctacggcattttcaaacatctcaaccaatgatgcataacgatccgggtcaatctccgcaggaacatccgccggataatgttttagccagactttctccaaggtagtactcctgaaattttaattgctatgttatcactcgcctaataaataacgcacgctttgatttaacaaattattaactcagcgtaccagtttaaaaaagaaacattgttcaggttgagatacacatcactaatttcacgttaatcctgatacataaaaacaaagggaattgtgttatctgtaaattatttttatttatcagtatattattgccatagttaatatttaactttgtagctattgattatacattgacctacttattttttgcttaagatagcatttttgaaatagcatttattgctttcatctattccaatgcattattaaaaaatcaatattaataaaaaatgattatataccttatggatttcaagatgcatcgcgacgacaagggagtgaatcaggtattcagaaacagcaactttgggtcgctgaaagtgagcaaaaactggttggatttgcgctaatccgccgcttaaatcaattgatgctgctagctgagattgatgtgttgccgaaatatcatggccaaggtattgccagtaccctgcttagcgtaatcattgagcaatgagaacaaaacaaggaaaccacactttacctcataacttttcgtcattttctaccaagtcgcaaattatatgacaaattcggttttgtcatactgcaatcgcatgatattcctaatgaactacagaaaattctagtagaagtgatgactgcgggtttcggtgcaagaattgcgatgaaattaacgatcaatccaaagatagagaggaaataacagataaattaccgccacatattattgcggcggctcaaactggaaagaaagttacaatgtcacaaagtagataactctatctggtcaaaatagtctcaacaggtgtggggtcggaataccaattccatccccaacctgaataatatggatagccataataattccaaggccccgggccataaggcatcaatactctctgaacaactttccagcgttgataacccattacattaatcacaacataatcgtaatccgcacaaccaattttcccctttttcaatcccactatcggacctacgacagtgacgtaatttcctttaaaatcggcaggatcaaggaaatcattaacataaacatagatacggccaagggaaggctcatctaattctgggctggcatccgatgctaatggcaatgacgatatttccagacgagtacgatgattttcattcactacaccaagtaccttgccgccgaatcgcccttcctgaccgataaacaactcaggcgtactcttaacagaaagcagatcttgaacaggcgttggtgacgttccttttactgaatcaggaacggtgatacagcctgtaagcattacaacacctaacaagattagcgccttaacactcgtccggtagtttattactcttaacataaccaccttctcctgaaaatgatgtttaaaataactctatctatttgatactttcttttactacaagtttcatcaatagatacttaacggcctggtaattttttccaagtaacttcattacgcaagtataccggttcagcatgttctacagccgtcacctcaccgttttgccacatctgtattgccagaggtaacatatcttcagcatgaggtaatgtgatactactatcagttagcgttaaatgacttgccatcaactgaggataagcctgccagccagtacccgcaaccacccaatcgccactcaatgaagccatgaatgcctgtacctgttccggcttcagcacggcttctgtttcacgtccttgccattcaccttgctgattacggatatattgcccccagtaaacctctcccatccgggcatcaatggcggttaatacctgagttgcacctagcagacgaaaaacaccttgagccattgcattgagcgttgacacaccaatcactggcagttcagcccccagagacaagccctgagcaataccaacaccaatacgcacaccggtaaaactacccggcccacggccaaaagccaaagcatcaagctgctgtaaactcatcccggcttctgccagaacagattgaaccataggtaaaatgcgttgcgtgtgttcacgtggagaaatttcaaactgtgccaaaacggcaccatcattccaaagagcaacagaacaggcttccgttgcagtatcaatagccagaattcgtacaggcatgcctcaagcacctcggcaagaaatataattcaaaataaagtgctattttatcatagcctagtcgattttacccagttggcagccatatgaaggccattaccctttgccatatgtacacaggggatagctgtgtttttatgaattatcagatagaaaagagataagtttacctgtgctccatcgcttctcaacgtgatctgctgctataattatggagcaatccttaattatgtcatgcaatagcctgaattccgttcttcttaactatcgtaagcaacctcaaggctgggcctccgggtttttttgctccacgctcccagtctgatataagatttttgctcacattcaaatatcgggcaaaaacaggctgtgacaaatgctcccgctcacgaagagaacgtatttcctctggagatagtgattctatgggagtcaaacaggcagcatcaaactcacgcatagtttgcttactgacagcccctatttcgcttaatgcctccatcgtttcgtgaattgcagcaaacgcatcactacgatactttttaaccatatttaatcacctccgaaaaatgacctttttcaattagtctagctaattgttcatctgataaccctaaaacgtgggacgccatcttcttaaactgcatctcttcatcatattcaatattagatctatcacttttagcaaacccgtaaacaaaaaaagcatgctctgcggtctggtacaaaatcactgtgcgaaacccaccagactttccttgccctttacgtgccacccgctgcttaattacaccaccgcccaaatcagcatcaatctgacctctattggctctttcaatagcatcaagtaaaacctcatctggaatacgctgttttctggcaaaacgctcgaaccatgcatttttaaatactttcaaaaagtagttccactattaaatcaattaaagtataacacaaagcatgacacaaaatggcgattaaaacaacaacagggattaatctaactatcaataataccctataaaaatatttactttacatagtattgcgtacagttatacctctgatgtcgatactcttatctgcactattagctcttcctcctttagtttaatttgtttctgttgctatatagattcataattgttcgctcaattagcagataatattttctacacttaacttaatctttaatgttaggagattgccgggcttgcaggaaagcgaccgctttcgttaaatctcgggttcgtggtgaaggcggcaaactattcaaaaacacttcaccatatggacgcatcactaaacgattatcacaaataacaacgacgccataatcatcaatatcacgaataagccgcccgacaccttgtttcaggctaatcaccgcatctggtaactgaacttcattaaatgcatcaccacctctaagttggcaatcttcaatacgggcttttaacagcggatcatccggtgccgtaaagggcaatttatcgataatgacacaggaaagcgcctcaccgcgcacatcaacaccttcccaaaaactgctggttgccaccaataaagcgttgccggcagcaataaattgcgaaagtagctgacccttgctagtttccccctgaaccaaaaccggcaatgtcatgttggcacggaatgcctcagccagactgcgcatcatctggtgtgaggtacataaaaagaaacatcgacctttattggcttcaatgagtggcttgagcatctctgccaaccattttgcactaccaggttgatttggtgatggtagatgacggggaacgcaaagtagtgtctgactttgataatcaaatggacttggtagtagcaacattttcgcctgttttaaacctagccgttcagtgaaatgggaaagttgctcgttaacagagagtgtcgctgaggtgaacacccaacaaccggattgctcattaattatctcactaaatttatcggcaacagacagcggtgtgagtgctaaaagaaaatggcgaccataactttcaaaccaatagctataaccggggatagtcacctctttcaagcgtttaagacgattacgataaattgttgccctttcaaatgccgcatccaacatgactgaacgccctaaagataatttcatcacgtcataacaaagctcaagcgcatcatcaagcaataccaatgcccgctgcacttgcggattttgcaataactcccgcaaattaccccgataaccgttctctcccaacgctagccggaaatcttgtgtactctgactcagacgatctgcgctcttttgtaattgaacttgatcccggacttccgtgcgatacgccatagtgatgtctctggagagatccatcagttgacggctacttaattgctgaccaaaatattgactggcaatatcagggatttgatgtgcctcatcaaatattttgacttctgcttgcgggatcaactcaccaaatcccgtttctttcactaccatatccgccataaacagatgatggttaacaacaataacatccgcctccattgcccgacggcgagctttgagaacaaagcattcctgataacgcggacaatcactgcctagacagttatcgttcgtactggttaccaacggccaaacctggctatcttccgccacttggtgacaagtactgatatcaccctcttcagtttgtgaagaccagcctcttagccgaacaatatctgacagaatttctgcttccaattgtccgcccccaaaagagtgctgttccaaccgttccaagcacagataatttgcacggcctttcaacaacgccaatttgccggtgaaattaatcgcttcagcgactgtcggtaaatcacgattatagagctgatcctgtaatgccttagaacctgtggaaatgataactttctgcccagaacgcaacgcgggtgctaaataggcaaatgtcttacctgttcccgtgcctgcttctacaaccaattgttgatgatttttaatcgcacactcaatagccactgccatttctctttgagcatcacggggtttaaaaccggttattgctttagcaagggcaccatttttcgcaaaatcgtctgacacaaaccgtctctttcaatagaatggatggagattatgccaatagtatgttctgatcaccacccaaaatcaggcagatagtcattcacaggaaggaatatccatgacaattgaacgtattgatcctcaagatcgctggtccgaagcggtagtttacaataaaaccatttactacaccgccgtaccggaaaacctggatggtgatattactgagcaaacagcgaatacactggccgctattgatattatgttacagcgtctcggttctgataaaagcaaaattatcgacgccactcttttcctggctgatggaaaagagtttgctggcatgaatgccgcctgggatgcatgggttattgcaggaagcgcaccagtacgctgcaccgttgaagctaaactaatgaaccccaaatataaagtcgaaataaaagttatcgcaggtatttaatattaattttgggatattctctatcgcctacatttatattttaattatatggaggttattcagaatatcccaataggtgttattaatataagtaagatatgatttcccctgttaatttagttgcaataacacgttaaaataaaacattaatcgatattttcataaactatattattcattgatccaagtggaatattataaacccaacaattctaaccttcctcctatgccttgaactatcggtgaccattataatgttcattaaggccatcaatgaccactataatggtcaacaggagggggaatgttaaaacatagagcctattcaaaattctctcaagaggcagttatgttactcggagaacaaatcaagttaggtagaaaacaacgccattggtcagaaaagaatttggcagaacgtgctggtatatccagaaccacactacaaaaaattgaaaacggggatatgggttgttccataggattagcatttgagctggccaaccttgtaggtatcagcttgtttgacagtgataaatttcctatctcagcacgtatagaacaaacaagagataaattagctttattaccacagcgtattcaggaagaaaagagagaggtatacgatgatttctaataacaaagaagttgtttagtcccaacatttgatggctagatatgctagttatgaaaaatttgccgagattatacgatatcgtttcactaatcctcagaaaacattagaagaattattttcacgattagtttttaatatactgtgcggtaatacagatgatcacgctcgaaatcatgctgcattttgggatggaaaaaatttaagtttaactccggcttatgatatatgccctcaaggtagatcgggtaatgaagcatctcaagcaatgttaatagtcgaaaataaaaacctcagccaattacaaacctgtttagaaactgcacataactttaatatctcagagaaaaaagcaaaagaaatctttaatagacaaatattaatcatccaagataattggaataatatctgtgaagaagctgagttaagtgaaatagataaaaaattgttctggcatagacaatttttaaatccattctccataattttttgagaactttaaaatctgtacataaacttattataaacccatcttacgggccaaaacacctacgctatttcagtaatggcccttaataattcattttggaaatatatgttatgtttgagccactgataatattctgatgatcaatgtaaataaaatagtttccaatattgcttatcacaaatagcgttaatttcatctggtagagttaacttaccaaatggattttctattatttaccttttcaatgttgaattatacttatacgtcgtccatactttctaataagcacatcagtgtctggtcactgtttagtgaatataaacatggcctaatcttcaataacttttatcacttggtatggagcattctatggatgtttgttcaggttgtcatgattcccttcatgattccgttgttgcggaagtagaaggcaagatctataaaagttgcccatgttgttccgccgcaatgggtcaacatgttttttatcgctatgaagactttggtatgagggatatgggtgatggccgctatattgttcagtcttggtgtcctggttgtcgagtaaaagatggccataaaccagacgtctgttttacctgctaaaagtcatctttattcatatctgctggttattatgcaaaatagttgctagttgcatgccagcagataatataagaaataaacaataaaatttgttacttaaaaacctgaacgctaataatgtgtctttatcctgattttaaaaattaatatggcttaagccatcttgatcatcaccatgcccaacagcaacaaggcaattccaccccaacctttataattcaaacgctgattaaacataatccagccagcagcaaccgtcgcgataataccgaaagcgccccataaggcataagcaatggacaactcaattcccttcactgcctgagcaagcgcactgaacgccccaaggacggcaataagcgagagaatccccatccaaggacgtctaaaaccattagaaagtttcagtaaaatattcgctaaaatatccaatacgacagcaaggaataaaaacgccgcatgccaccattcaaattgttgcaacatgttacgcctcctttattttactgcttttggttgttgcaacactgacagccttatttgccatctgcttcactacctctgccgattttttgactgcggcttttctcgtaccggatttaatcaacataatccctgttatcagcagagccaatccccctactttcatcaatgacaatgattcatcaaaccacatgacactaaaaacagtaataaatagaatgccaaccccttcccataaagcgtacgcaacgcccaatgccacttttttcaccgccattgccagcaagatataggatgtggcgatcatgatgtacataacggccatgccaactacaccaccggaaacgctggcatgtttcatcgataaggtaccgataacttcggtaataattgccattgcaaggaataaccaataaatcattttctttctcctgaccacgtaaatacgcacgtcaagacgcaagctataaatgatctaaacccacccatatataagatgagaaataataacctgacgtttttgacgaaatagaaataccggttgaaaaccggttaacaggagtcagacgctataatgaaccgcaccagtaatgctcactggataaaatggcagaaaggaaaagcatgtgagtggaactttgaaacttgacgcttttggcgctgttcatgatatctcattctttcatcgcaccgatattccgcgcgatatactaagaatcctcataaatagtgttaattttcatagtacttctaccatataagataatagaaagcaactgctcaccctcatttatttttttatctgataaacaatgttgaatagaaaaacagaattgataccaacataggctgataccttgttgatactaacccaagccgcttatagtacggcttgagcttcaacagaaaggtttgtcaattactcaaactcattccacgaacgaccatcgcgagtgatcatcgcaacagaagcgaccggcccccacgtccccgcctgataaggcttaggcgcatcattatccgccgcccatgcattcataatagaatcaacccatttccacgcttcttccacttcatcacgacgaacaaatagcgcctgaataccccgcatagcctccagcagtaacctctcataagcatccgccaacggaatatggttaaacgtttcagagaaactcagatctagcttagtggtttgcagacgatgcttgtgttccagccccggagctttgttcagcacttcaatatcaataccttcatccggctgcaaacgaatcgttagcttattctgcggtagttgttgataagactcagaaaacaagttcagtgcaggctttttgaaataaactaccacctcggaacatttcgttggcagacgtttaccggttctcaggtagaaaggaaccccggcccaacgccagtcatcaatatcgacacggatagagacaaaagtttccgtccggctggactggtttgccccctcttcttccagataccccggtaccttatgcccctgaacaaaaccagcagtgtattgacctcgtaccgtcttctcccgcacattcgtatgatcaatacagcgcagagaacgcaatacttttactttttcatcacggatacggtctgtcgtcagatctgccggaggagacatagcaatcatggtcaatatttgcaacaggtgattctgaatcatatcgcgcatctgcccagcttggtcaaaataaccccaacggccttcaataccgacttcttcagctactgtaatttgtacatgatcaattgtccggttatcccaattattcacaaacaaggaattggcaaaccgcagcgccaacagattcaatacggtttctttacccagataatgatcgatgcgataaacctgacgctcattgaaatatttagctacttcatcattgatggctttggatgattcaagatcggtccctaaaggcttttccatcacaactcgatttggctctttatttagccctgcaaggcccaatccgtgacaaaccgaaccaaaagtactgggtggcatcgcaaaataatggattgcaggccgattatcctgcttaagaattgccttcaatttggcaaagtcttctttttgattaacatccagattgcagaacgccaaacgctcactcaatatcttccataattctgaatctaatttttctggcaagaatgtatttaaagcttcttcaacaaccttggtataagcttttttatcccaatcagcccggccaacaccgataatccgggtttctgggtggatataacccgctttctcaagctgataaagggaaggcaataatttccggcgtgccaaatcccctttagcgccaaaaatgactaaatcacaagcctgagctgtagaagtaaccgccatatgtctctcctcgttgcgggatattgtaattttgttacagcattaaccgataatgtactcttttgaccatggcgcgtaaacagagataacgaataaccatcaccatgcgttaacaatatgtttctcatatgagaaaaatgtgataaatttatgtaattttccaacgtttatgaaagataattaccaatatgaaagttagacacttgtcatacttttatgaaaaacattaaattattgtgacttcctactgccagcttcaatttgctaatagtatattttcataaaaatttacatagatttctcttctgaatgaaatcgtcaaaaaccacaggtaactgcgttttatgaatacactggaacgggtccaaaacagtatcgaatttttgagtaagtcagaaaaaaaagtggcgcagacaatcctggcttcaccgcaaactgcaattcataccagtatcgcaacactggcaaaaatggcggaagtcagtgaacccacggttaaccgtttttgccgccgtctggatactaaaggttttcccgatttcaaactccatctagcccaaagtcttgccaatggcacgccttatgtaaatcgcaatgttgaagagagcgatacagtgagtgcctacaccaataagatatttgaatcggtaatggcaactctggataccgtcaaaaacaatttggatattacagccattaaccgagctgttgatttactgactcaagcccggaaaatctcatttttcggcttaggggcttctgcggccgtcgcacacgacgcaatgaataaatttttccgcttcaacatccctgttatctattttgatgacattgtgatgcaacggatgagctgtattaacagtgccgaaggtgatgtcgtcgtactcatatcccataccggcaggactaaaagcctggtcgaagcagcacaacttgcgcgagaaaatgatgcgacagttatcgcaattacctcccaagattctcccctcgcccacgaagcaacactcgccattcttctggacgtcccggaagatacagatatttatatgccaatggtctcaagaatcgctcaattaactgttattgatgttttagctacgggttttaccctgcgccgtggttcaaaattcagagataacttgaaaagagtcaaagaagcgctacgaaattcacgctttgataaaattgactttcccccgacctgaaaatagtccccttactattaggctgactcgcaaccattgcgtagtcagcgatcgtttatgactcagtgagcatcggtaaataatctgcactagccaacaagataagcgaggaattattgaattatatcaagaaaatcccatattatttagttaactcaataaaataatgaccgtttaaaattaaaacataggatattattataaaaaatttaccgaaagaaatagaaagcaggaagataaaaataattttcaaatattgaatataaactgtttagacatttacccgatcaacagtttcacatttattatttccactcattatacaaaaactattacccctctaagttataagaatactttattatgttttttccgagctaaaatattattgacatatattacttaaaattaattttttaataattcagtatgttgtttataaaagcacattatttatacatgaggaaaatatatgaatctcaagaatgattttaaagctttttctattggtaataatgctaatatagtcagtcaagaagcctatgaagaaagccgaagtttgaaaactgggttccccccaagcgatatcactattcatgtgctaaacaaagtattacgtcagtcatcaaccatctcctctgtcatcgctaattttatcacgacccaatctggtagtgatattttggatgatggtgatatcgctaaacttattactcaattaaatagcgcgttagaacaaaaaattacaacaactgtgccaaacgcctcattaacacaacaaggcattattcaactcacagataaaacaggcaatagtaatacccttgcggcaacacagaagcttgtttctgatataaacgataacgctaataatcggctagcaaaagaccaaaacggtgcagacattcctgataaaaatgcttttgtgagaaatctcagtttgttcgaaaaattgatcccggtaggggtaccacttccctggccgactaccaccccaccagaaggatgggcgcaatgtaacggcgctccctttgataaaacaaaatatccgaaattagcgcaagcctatcctaatggagcattacccgatttacgtggtgaatttattcgtggtttagataatggtcgtggtattgataacggccgtaatatattgagttttcaatatgatgcgttcaaaagacataatcatagtatttataccactgacagcccaagctccacccgtgcaaatacagatcccgtgcggggtagtctgcatggcagtataagcgatcggggtgactcaggggaaaataaaaccattgggatgaatggtgataatgaaacacgtccaagaaatgtggcatttaattacattataaggaccgcctaatgagtaaatccgcattggacaaaaacaatatggctattagcatattttcagatgttgaatataaatgatttatacccgttatctttcaaattgcctctttgttggctgcgctcactcaccccggtcacatagttacctatgctcccggggattcactcccttgccatcgcgatgcatcttgaaatccatagggtatagatatttacccgatcatacaatttcgggattttatttattctcattatccaaaaacagttacccctctaagtcataagaatattttatcatatttttttcaagctaaactattattgacatatattgtatggaatgacttttataataattcaatatattgattaaaaaatcaaattatttaattacaggagagaacatgagtaaaaaaaatgattttaaagccttttccattagtagtaatgctaatgtaattagccaagaaagatatgaacaagatcagggtttgatgactgggtttccaccaaaaaatattactactcatttgctaaataaggtattacgtcagtcatcaaccatatcctctgttatcgctgattttatcgcgacccaatctggtaatgatgttttagatgatggagatatagctaaactcattacccaattaaatagagcattagaacaaaaaatcacaacaaaagtaccaagcgcctcactgacacaacaaggtgttattcaactcacagaccaaacaggcgaaagtaatgcccttgcggcaacgcagaagcttgtttctgatgtcaatcagaatgcaaataaccgtctggaaaaaaaccaaaacggcgcagacattcctgataaaaatacgtttttgaagaatcttggcttaatagaaaccattattaatacccaatatcctgtaggaattgtgatttggttcgctcaaaataaaaaccccaatgtgctatttccgggtactacatgggaatatattggtgaaaataaaaccattcgattagctagcgccaatggctccgatattttatcaaccggtggcaatgatttgataagcctgacagcagcacaaatgccagcacataatcatacattttttgggacaacgagcacatttgattatggcaccaaaaccaccaatatcgccggagagcattatcatgatagtgggtggggtgaaactactggtgggcgttatggtcatttcgacggttctaagaacaatcagggatcaaaatctacagattggaacaatgccaaatttaacactagcactaatggtgcccactctcatacggtatcaataggagcacataaccatacaatttcaggtaacaccggagattctggtggcaatgcagcgatttcaattaccaattcatatattaagttaatgggatggtatcgaaaagcataagaaccctacatcccccgggccgctaacaaatctcacgcaaatagctgtctcttgatcataagtctgacttaagagacagtgccaactcgtcctcctcaaagaaaacttatcatttgcatactttacagcatacccaccctggacgtttcgtgctttccagccctcaagtgttgctgaatcccagtaaatttcagaaagcttgtatcagactcacacggcaagacggggagcagtcacattattgataaatcgggaacaaatcgtgataggatagaaatacggcaataaatatccgttgctgacactggtcaataggcactacagcgaaaagtatcatgataagttgatatgggtcacaaaagtaatctataaacaggcttgatagttggattgccgaagagtttttttactcgttttataccctatggatttcaagatgcaccgcggcggcaagggagcgaatccccgggagcatagataactatgtgaccggggtgagtgagtgcagccaacaaagaggcaacttgaaggataacgggtatataggataattaatagattattgattatttttatataaccaataccaatactcacaggtcaacggagtaacacatgtccagacggctcagaagaactaagattgttactacacttggtccggctaccgaccgcgataataatcttgaaaagattattgctgcgggtgcaaacgtagtccgccttaacttttcccacggtaccgccgaagatcatctccagcgagccagcaaagtccgcgagattgcagcccgcctggggtgccatgtcgctattcttggcgatcttcaaggacctaaaatccgcgtatcaacgtttaaagagggcaaaattttcctgaatatcggagataaatttctccttgatgccaatcttggtaaaggcgaaggcgataaggagaaagtcggtatcgattacaaaggactacccacggatgttgtaccgggcgatattttgttgctggatgacggacgtgttcaactcaaagtattagacgttcagggaatgaaagtcttcacggaagtcactgtaggcggcccgctatctaacaataaaggcattaacaaactgggtggtggattatccgcagaagccctaactgaaaaagataaagaagatattattacggcggccagaatcggcgttgattaccttgccgtctctttccctcgcaccggtgaagatcttaactatgcccgccgtctggcacgagacgcaggctgtgaaacgcagatcgtggcaaaagttgaacgcgcagaagccgttagcagtgataaaaccatcgatgaaatcattctggcttctgatgtggtcatggttgcccgtggtgaccttggcgtagaaatcggcgatccagagttagttggcgttcagaaaaaattaattcgccgtgcccgccagctaaatcgtgtagttattaccgcgacccagatgatggaatctatgatcaccaatccaatgcccacccgtgcagaagtgatggatgtggcaaatgccgttctcgacggtactgacgccgtaatgctctccgctgaaaccgcagcgggccaataccctgccgaaaccgttgccgcaatggcacgagtctgtctcggagcagaaaaaatgcctggcctcaacgtatcaaaacatcggctagacacaatttttgacagtattgaagaagccattgcgatgtctaccatgtacgcggcaaaccacttaaatggagttaaagccattattgccatgaccgaatcaggccgcaccactcgcatcatgtctcgcattagttctggtctcccgatattctctatgtcccgtcatgagaaaaccttaaaccaaacggcactttaccgtggcgttacaccggtttattgcagtagtcatactgacggcattacggcggccaatgaagcagttaatcgcctgcgtgataaaggttatctagtttccggtgatcttgttctggttactcagggtgatcagatggggacgattggcagtactaacacctgccgtattcttgaagtggaataaagcgccacaacattttgcgtcaaacgcgcatcccgcttaatccaacgacaattcgacggtaaaataagcttttaccgtctcttattgcttttctatgactctgatcgcttatatacccgtcatctttcaagttgtctctttgttggcttcactcgcgatgcatcttgaaatccatagggtatatatctttgtagctaaaatcacaaatcttctctcccatagggcccaatatcacccgctttccgagtcttaagtaatttaagtatccaggtatattgttcagggttcggtcgcaccaattgctccaactcttcattcattcggcgggcaataaaagcatcatctttgccatcaatatcatccattggcggacgaatataaatatcaagctgatgagtacggtaattataaaccggaaacagcggcacaatagcagcacgacaaaccttcatcaatcgcccaattgccggcaatgtcgctttataagttgcgaaaaaatcaacaaactcactgtgctcctcaccatgatcttgatcaggcagataatatccccagaaaccctggcgaacagcagcaacaaacggtttaattccagcatcacgagaatgtaaacggccaccaaaatgatggcgaactttattccacagataatctgcaaccgggtttttctggtgatggaacatggctgatattttctgtccgcccacagacagtaatatcgctggaatatccacagcccaaccatgaggcaccatgaaaataacgtttttcccctgcgctttcagttgaagaataatctcttccccatgccattgcgtccggcttaacgttgattttgtaccacgtaaacacagttcagccaacataacaaaaggttgaggtgcggtagaaaacatctcatcaatcaatgcttcacgctgttgctccgtcagttccggcatacagtaacacagatttattcttgctctacgacgtgcccctttcgctaacttacccgccaaccagcctattttagccagcagaggatcacgcactttaactggtaggtaagccagcccggccaacacaccaatgcccagccataatccccagtaacgaggatgcaggtaagatttatgaaatgtcggcacataaccagctttactgtctgtatctgtttctttatgcatgagataactctttaaaacaaaacgataatttgccattttcatacagggatctatatcaacagatgtcaacatatcttgttctgcaatacaaaacgacagcggatgatatcaatcatccgctttaaagtctgttactaatgaacaattaaactcaatctaacagaagctggggcgttacctcttttaccattgccaagaattctgtgcgttctttaccactcaaaccgccagaacgcggcaatttcgccgttaatgggtttaccacctgctgattgatccagaattcataatgcaaatgtggaccggtagaacgaccagtgctaccggacaacgcgatacgatcaccgcgttttaccttctgccctgatttcaccaacagctttctcaagtgcatataacgcgtggtatattggcgcccatgacgaatggcaataaagttacctgctgctccgttatatttggagacaatcacctcaccatcacctaccgccaaaacaggcgttcccaccggcatagcaaaatccacccctttatgtggcgcaacccgaccagtgactggattcacacgccgaggattaaattgggaagatacccgaaattgcttggcggttggaaaacgcaaaaatccgcgctccagaccggaaccttgacgatcataaaaacgcccatcttccgcccggatagcataataatctttaccaccactatttaggcgaacaccaagtaattggctctgttcactgtgaccatccaacatttcacgggacagcaatacagagaaacgatcaccttcatgtaatttacgcaaatcaatttgccattgcagtgccttggtaacttcacgtgcttcactgctggttaagccggcatttaaagcactgctggtaaaattactatcaacaacgccaacgacgacgctgtttttccattcccctttctgaaactcttttgtttctttaaacagatcgccctcacgggtataaatgcgcatttcacggcgggaaacaccccaagtcagcgtttgcaagtcacccgcttcattgactgtccatgacaatggctgaccaatattcagcccccgtaacgctttatgctgactcgcgagtaacgcgacatcagaagagtcgataccaaattgggtcagaatattactgagggtgtcaccgtcagagacaatatattcatgcggagtttgagccgtaacctctgagttcgtctcttcatcaggaataccttcatccggtagctgttcactgctatctgcaataatctcatcactatctaccggaagattgatagcgatgctgccgactgttgtttcttcttgttcatgatgataagcaataggttgccacatagtgacaaccaatgttgctacagtcagcgaacccaacataattttatgcggtcgcggtaactccttatacaccagaacgatagttttaactatctgttgcactcattgaattccttattgctttaattcaggcaacccgcgtactgttccgacaactgagttataaatttcatatagctgtccttatccaatacgatgcggcctcctaacggatctaaagtgcccatacgcactcccgtatccttcgccacagcattaataacggtcggcctgaattgtggctcagcaaaaatgcaggttgctttctgctcaaccaattgtgttcgtatatgatgtaatttttgtgcgccaggttgtatttcaggattaatcgtaaaatgtcctaatggcgtcaggccataatgctgctcgaaatagccataagcatcgtgaaaaacaaaataccccttaccacgcaccagcttaagaatattagcaatatttttgtcagtttgcgcaagctgcgcattgaatttacgtaggtttacgtccagcgctgcttttttatgcggataacgcgcttgtaattggtcatgaatcccctgtgccacctgttttgctatttctggtgataaccagatgtgcatattatattcaccatgagaatgatgttcatggtcatcttcatgtttatgctgatccggttcgggtaaatcttcattatttttcagcaataatggcctaatcgttggcaattgtgctaaaactaactgtttattttgtggaactttggctaacggtttagacaaaaagatttccatctcaggtccaacccacacaactaaatctgcccggttaactttcttaagatcagacggtctcaacgcataatcatgcggtgatgccccatcaggtaacagtacctgcgtatcagttacaccctcagttattgccgcggcaataaaacccaatggacggattgatgtcacaacatcagcattaaccgattgtatcgttcccgacatgaaaacagcaataatcgcggtcttgcagagaaatttgtgcgctagtttatatgatttgtgtaacataatgtaaatatctcgtggacagaaaccagaattgttatattataacatctcaatgttcacgcaagatatatttaacatgtcgacactcatcactttaaaaaatgttgctgttaatttcggcgatcgtcgggtattaaacaatatctctcttcatttgcaacgagggaatattctgactttgctaggtcctaatggtgccggtaaatcaactttagtccgcgttgttttagggcttattgagccatcatccggcactattgaacagaccgatggattgaaaatcggctatgttccgcaaaaattgcatcttgatcccaccctgccattgacagttaaacgcttcatgatgctaaaacccggtgtcaaatctggcgatatattgccggcacttgaacgggtaaatgctgctcatctattgcaacagcccatgcaaaaattatccggaggggaaagccaacgggttttattagccagagcactattaaatcaacctcaattacttgtccttgatgaaccaacacaaggggtcgatgttaatggtcaattagcactttatgatttaattaatcaaatcaggaccgaattgcattgtgctgtactgatggtttcccatgatttgcatctggtcatggcgaaaacagacgaagttttatgccttaatcaacatatttgctgttccggcacacctgaagttgtttcaactcaccctgaatttatcgctatgtttggtcatcacggtgctgagcaattagcaatatatcgccatcaacacgatcaccatcaacacaatcaccatcatgatctgaaagggaaaattatcttggaaaataacagggaatgccactcatgatcgaattattattccccggttggttggccggcgtattattggctattgctgccgggccattaggttcatttgttgtctggcgcagaatgtcctattttggtgatactctggctcatgcttcattgctgggcgttgctttcggattattgttaaatattagccctttttacacaattatcgccgtcactttgatactggcaatgatgttggtttggctggagaaacgtcctcaattggcaatcgatactttgttggggattatggctcacagcgcattatcattagggctggtggttgtcagtttaatgtctaatgtgcgagttgatttgatggcttatctatttggtgatttgttatcagtcacctatgaagatatttggttaattgccatcggtgtcaccattgtcaccacgctcctgttctggcgatggaacgccctgctctctatcaccgtcagtcaagaaatggcttttgtggatggcattaaaatacagcggttaagagtgctgttaatgctggtaacagcgttgacaatcggcttggcaatgaaatttgtcggtgcactgattatcacctccctgctcattatcccggccgccactgctcgccgttttgcccgcacaccggagcaaatggccggtattgctattgcggttggcatgcttgccgtcaccggtggattagctttctccgccatttacgacacaccagcaggaccctctgtcgtgctatgtgctgcggtgatgtttattgccagcctgatcagtaaagcaaaaaattaatccactgagtgggtacaacccggttatcaggagaacgggataggcttcccttacgggaatgcccatcccgatttttcaggcaattacatatacccgttatctttcaagttgcctctttgttggctgcactcaccccggtcacatcattacctatgctcccggggattcgctcccttgccgtcgcgatccatcttaaaatccatagggtatagatcattcctgatttctgaccatgccaaaatggcgataagcatgttcagtggcaattcgtccacgggaagtacgttgaataaagccctgttgaatcaaaaagggttccagcacatcctcaatcgtttcccgctcttcaccaatagcagcggcaaggttatctaccccaaccggcccgcccataaatttatcaatgatggcaatcagtaacttacgatccagataatcaaaaccggcagcatctacgctcaacatatccagcgctctggtggcaatattgccatcaatcgcaccattcccttttacttgagcaaaatcacgtacccggcgcagtaaacggtttgtaatccgcggcgttccacgagaacgcatagcaacctgccgggcaccatcgtcagtaatctctactcccataaaacgggcactgcgagaaacgatactttgcaaatcgtccacattataaaattcaaggcgctgcacgataccgaaccgatcacgcagtggcgaagtcaaagaacctgcgcgagtggtagccccaatcagggtaaaaggcggcaaatcaattttgatcgaacgggctgccggcccctcgccaatcataatatccagttggtaatcttccattgctggatagagaatttcttccactaccggcgataaacggtgaatttcatcgataaacaacacatcatgcggctcaagattggtcagcattgccgccagatcgcccgccttttccaacaccggaccagaagttgtgcgaagattaacgcccatctcattggcaacaatattcgccagcgttgttttccccaatcccggcggaccaaaaatcagcaggtgatcaagggcatcaccacgctgtctggcagcctgaataaaaatctccatctgctcacagacttgcggttgcccaacatattcagacaacaatttaggtctgattgcgcggtcaatcgcttcatcgtcttgcaaaacttccgcagaaaccagacggtcagcttcaatcatggcttacccctgtaacttagagaacagcgcgaagtgcttcgcggataagtgtttcacaatcagcacccggtttagcgattttactgaccatgcggctagcctcttgtggcttgtaacccagagagactaatgccgcagcagcttctgcttcgctatcagcgtcagaagttgtctgtttggccgttgccggcaaattaatatcactgctctgattgaagagatcgccattgagccctttaaagcgatctttcatttcaaccaccaaccgttcagcggttttcttacctacacccggcaatttaaccagagaaacgatcgcttctcgttcaatagcagaaacaaattgctgcgcagacatgcccgaaagaatagccaacgccaatttaggccctacaccattcactttaattaattcacggaatagcgcccgctcctgcttatcattaaaaccataaagtaattgcgcatcttcacgcacaacaaagtgagtaaacagaacagcttcctgtccggcatcaggcaattcataaaaacaggtcattggcatatggacttcataaccaacaccatttgtttccagtaaaaccaaaggtggttgtttttccagcacaattcctctgagacgccctatcactcgtttaccccctaaaacctaaaaaataaaactgattgttctatttatggttataacataaaaaaagctggatgcatatccagccgttatcttaaacgtccacgtgccaaaattaatctgggatcaccaacccgcaaaagattctgattaaagtgacaatgggttatcgcaatcgccaatgcatctgccgcatcggattgcgggttagcagacaatttcagcacagaacgcaccatgtgctgaacctgacttttttcagccgccccggttccaacaaccgtttgtttcacctgccgcgcagcatattcaaaaaccggtatagattgattaacagcggcaagaatagccactccccgtgcttgccctaatttcagcgctgaatcggcgttttttgccataaagacttgctcgatagcaaaagcatctggttgaaattgcgtaataatttcaaggatacccgcataaatccgctgtaaccggttaggcagatcatcaacttttgttcggatacaaccactgccaaggtagctcaaatgacgcccctgctgacggatcacaccatagccagtgacgcgggaacccgggtcgatacctaagataatcgccatattctgtttattcgcctttgattatcacctttaataaaggagataaaaacgttagagaaagtgtcctgtaccacagcacactttctctacgctatgtacccgttatccttcaagttgcctctttgttggctgctctcaccccggtcacatcattatctatgctcccggcgattcgctcccttgccgtcgcaatccatcttgaaatccatagggtatacaacccgactgaaattacagcaaagccgcaatttcatcagagatttcaccgttatggtaaacctcttgtacgtcgtctgaatcttccaacatatcaatcaagcgcaataacttaggtgcagtttccgcatccaactctgctttagtggaagggatcattgaaacttctgctgattcagccacaaaacccgctgcatctaacgcatctttcacgtcaccaaaggtttctggtgtggtgtaaacatcaatcgcgccatcatcataggtttctacatcatcagcgccggcttccaacgccgcttccataaccgcatcttcatccagccctggcgcgtaagaaatcactcctttcttggcgaacagataagccaccgagccatcagtacccaaattaccaccggttttagtgaaagcatgacgaacgtcagaaacagtacggttacggttatcactcagacactcaaccatcaccgccgttccccccggaccataaccttcataaatgatggtttccatgttatccgcttcatcgctgccaacaccacgggcgatagcacgattcagagtgtcgcgggtcatgttgttggacagtgctttatcaattgcagcacgcagacgtgggttagatgccggatctccaccacccagacgggctgccgttactagctcccggataattttggtgaaaatcttaccgcgtttcgcatcctgcgcagctttgcggtgcttggtgttggcccatttactatgacctgccataaggttctccgataaaacgtctaataaacttattcaataacaaactcttcaatcgcctgccgattgctccacgacttagtgagctttactgctttatccgcatccagccactgataagcctgatgttcagtcaacaggcattctcgctcttccggcaatgccagacagaaccagtactctttattgcgggtgactcctggagcatagcgatggcgcaaatgggtaaaaatctcataataaagagaacgccggcaatctatcaattcaagattttcacctataatatcaataccgacttcttcttgcacttcacgcaatgctgtctcccacggcgtttcatctccatcaaggctgccagtgacagactgccaaaaatcaggatcgtcccgccgctgtaacattagcacccgtcggctggaaatcgcataaataaccaccagcacagactcggggcgcttataagccattattcactctcttttttagcaacaacagagattgataactcttcaagggacgccggattggcataacttggcgcttccgtcattaaacaagcggcagcggtggttttagggaatgcgataacatcacggatgttatccgttcctgtcagcagcatcaccaaacgatcaagaccaaatgccaaaccggcatggggtggcgtaccaaatttcagtgcatccagcaagaagccaaatttctcctgctgttcctgctcattaatgcccaaaatacggaacaccgcctgttgcatttcattacggtgaatacgcactgaaccaccacccacttcgtaaccgttaatcaccatatcgtaagcattggcaatagccgaaaccggatcttgcgccaactccgccgctgacatattacacggtgaagtaaacggatggtgcatagcggtcaggccaccttccccatcatcttcgaacatggggaagtcgataacccacagtggccgccagctatccaattttgtcaggttcagatcgcgccctaatttcagacgcaacgctcccaaagcatcagtgaccacttttacactgccagcaccaaagaacaaaatatcgccatcctgtgcatcggtacgagaaagcagaccttcaatcacctcggcattcaggaacttggctatcggactttgaaccccttccagaccggcagcacgcgcattgacttttatccacgccagcccttttgcgccataaatcccaacgaatttgccatattcatcaatctgcttacggctcaattcagcaccaccgggtacccgaatgacggctacgcggcctttactgtcattcgccggctcagcaaaaacactaaattccacatctttaaccagatcagcaacatcaaccaactccaacgggttacgcagatcaggtttatcagaaccgaaacgacgcatcacttcagcaaacgtcatcaccgggaaatgccccagatcaacaccgtcaatttcaaaccacaattcgcggatcattttttccatcatttcccttacctgctcagcagtcataaaggaagtttccacgtcgatttgagtaaattctggctggcgatccgcacgcaagtcttcatcacggaagcatttaacaatttgataataacggtcaaaaccggacatcatcagcaattgcttaaataactgcggagattgaggcaaggcataaaatttgcctttatgaacacgacttggcaccaaataatcacgggcaccttcgggtgttgctttcgtcagcatcggcgtttcaatatccaggaaaccctgattatccatgaaacgacgcacaaaactggtgattttagcccgtgttttcaggcgatttgccatttcaggtcgacgcagatcaatatagcgatatttcagacgttgctcttcactgttcgtctgattgctatccaaaggcagaggttcggaacggttgatgatattcaaactttccgcaaaaacctctatttcaccggtagccatatctttattgatttgactgtcaggacgggcgcgtacagtaccggtgatttgaatacagaattcattacgcagttcagcagcctgagaaaatgcggcttgctgatccgggtcaaaaaatacctgaacgatcccttcacgatcacgcatatcaataaaaatcaagccacccagatcacggcggcggtttacccaaccacaaagagtcaccttctggccttcatgggtcagattcaactgcccacaataatcagtacgcatacaatatccttttactcggctgttgtgctgttgctgcggaaattttggcatcgttcttgaacttgaaaagtgtcatgaagtgtcaaaaaaggtcgccattataatggaaattctgctcagagataagggcaggtaatatcccgatgcgataccattgcttgatgtctgataatcaggcaatttattttcaattcccatctatttatagcgacagttttatttttggggtttatcataacttaattggccaatttcggttaggcaatggagttaaaaatggttagctcgctttatgttgtgttgggcgcactattattgattaagctgtcttttgatgtggttaagttaagaacacaatatcgtgtctcatatggagatggtggtttttacgaattacaaacagcgatccgcattcacggtaatgctgtggaatatatccctatctctatgttattgctggtcatgatggagatgaacggctcaaatgtctggatgatacatgtctgtggtttgattctgcttaccggcagagtcttgcattattatggcctgtaccaccgtgagttctactggcggcgttcaggcatggtagcaacctatctttcaatcgtattaatggtgataacaaatatttactacttgccttgggaacagatattttctctctactaacctaatagtactggcgctgaaataacaggcagcaaactcggctgcctgttattctaaccctagctgttcactatgtaaggaagactttccgacgttgacatgcaaagcgagcaagtgttggtttttttacctctcattggcgagggtataaaccgcatctccgacccgtttaccacgtttaccaatagcaattaccagcaagataatcttattgtcattcacttcataaaccaagcggttgccagaagaccgcaatttaattttgtatcggttcgatcgcccacttaatcttgctgacggcacatgagggttttctaagcgttcagccaattttctctttagctgctccttaattggatgacctaacttcttccactcttttaaggcccgcttttcaaattgcagactatagatcatccaggttcacactaacaaattcagcattttctaaacgttcatctgcaattttgtttagtgcggcatcctctgctagctcctgatagtaggcgaataattcaggaggcacacaataaaatgcaggttcattccgattcaggattgcgaccgcttcaccttccccctgcaaatatgtccccattgggttacgtttcaaatcggtaatacttgccgctaaatttgttaagatttgatatgccatacaccacctcactcttttacgtaagcaaacaataggtcatttaaaggtgctttacaatgcatctttacttttatatcaaacccaaagatcccctaatgctgactaatgaaatcaaggattgatcgcgtcatgatatgatttttgtgcaacacttaacctcctcaaatatttccattattcactacttttaagcacagagaaaattggttcaaggtcaagctttacatctgttagaatgccaccttctattttttctaataattaatgctgttatgtcaaatcaagatcctcaccatcaaagggatagcctgtttgctacgcctattgccaatctgggagactggcgtttcgatgaacgggtagccgaagttttccctgatatgatccaacgctccgtgccaggttattcaaatattgtttccatgattggtatgctggccggccgtttcgtgacatcaaacagtcaaatttatgatatgggttgttctctgggcgcatcaaccctggcaatgcgccgcaatattgtcgctgaaaactgcaaaattattgccgttgataattccccggcaatggtggaacgctgtcgtcgccatattgatgctttccggtcgcaaacaccggttgaagtcattgaagccgatattcttaatatcgatattcaaaatgcttcgatggtcgtactgaatttcaccttacaattcctcaacccgcaagatcgacaaggtttactaaaccggatttaccaaggattacgccccggtggtgttttagttttatcagagaaattcagctttgaagatcaacagattggtgagttactgtttaatatgcaccacgattttaagcgtgctaacggatatagcgaactggaaatcagccagaaacgcagcatgcttgaaaatgtcatgttgactgattctgtagaaacacacaaatcccgtctccatcaatccggttttaaccatgttgaagtctggtttcagtgtttcaactttggttcactgctggcgataaaaggagccgatgaatgatcgatttcggtaatttttatcaacttattgcaaaaaataacctccagcattggcttaattgccttcctgctcaactgcaagagtggcaaaaagcagccctgcacggtaattttaaatcatgggtaaaaaccctggaaaacctacccgaaatttcaccgactcaattagacttgaaaaatggcgtgatcgcagaacgcgatccgcccctatccgcaggtgaaaaaatttgccttaccaatatattgcgaatattcatgccgtggcgcaaaggcccattctcgctttatggtataaatattgatactgaatggcgttcagattggaagtgggatcgagtactgccccatatttctccattaaccggccggacaattcttgatgttggctgtggcagtggctatcacctgtggcggatggtcggtgaaggggctgaacttgccgttggtatcgatccaactcagctcttcctctgccaatttgaagctgtcagaaagttacttggcaatgatcaacgcgcccatcttttacctctgggcattgaacaattaccggcactggccgctttcgatacagtcttttcaatgggagttctctatcaccgccgctctcctcttgaccatctctggcaattgaaaaaccagcttatatccgatggtgaactgatattggaaagtctggttgttgaaggagatgaacatacctgtttaatcccaggtgaacgttatgctcaaatgcgcaacgtctacttcattccttcggcaaaaatggtgaaaatctggctagagaagtgcggttttgtcgatgtgaaaattgtcgatcaggcagtcacagccacggaagaacaacgtcgtacagattggatgaaaactgaatcactatctgatttcctcgatcctacagatagcaataaaaccattgagggttatcccgcccctctacgggcgatactgatcgcccgtaagccctaatttttcgaactggcccaacgttgggccagttcatataccctatggatttcaagatggatcgcgacggcaagggaacgaatccccgggagcatagcgaactatgtgaccggggtgaaggagtgcagccaacaaagaggcaacttgaaagataacgggtaaaacgagtaaatagattttattcaaataaagtcaaactcagcatccctttcatcacctctaccacaccaccatcaacacaataatgtgaaaactcatccacctcattgtccgcgctcatcgtcactcccgctttacgataggtcatggtagaaagcataatccggcttgccgaactgtgaacttccgttaacccgatatcgataaatttatgaatattactcatacgaacaccagcacctgccataataattggcccctgactggcttgatgcagctctttcaataagggtaatcctaattcggcattctgttgctggccggaagtcaatattcgtttaacaccaagttgagtgagttgatccaatgccacataaggattaaaacacatatcaaatgcacggtgaaaagtgacggccatatcgccagacagtgccatcaattgttgcatacggggcaaatcaatatgcccttcttcatctaatacaccaaaaacgacgcccataaatcccatatcacggatctgagccacatcatttttcatcacctcaaaatctgagtgactgtagcaaaaatcaccacctcttggacgtacaatgggatatacaggaatagttaattgctcaatagcctgcttcaatgtaccaaaacttggtgttaatcccccttccgccggactggcgcagagctctatccggtcagcacccgcctgttgtgcgattaatgcgcaacctacgctaaaacaacaaatttctaactttgtcatcagaagttccttggacacccagttattaacgagcaattaatgaatctaagcgattcagtaattcaacccactaactatgacatctaattattgccgatgatttgtaggaaatcacaaggtcagaacttttatctggatcacaaggatgaaaaagttaattttgctgactggtgctcacttttaacaatttcacgcaatgtaaatgggtgaaacttgacggagatctcaccatcagtgatagctaaggtcggattaggcaaccgctcttgttcccctttgggttgactctctttaactatccccaacttgggtgtaatattatactcaagttggggacagatggataaatgatggaagctgtttttattgaactaccaccttttgaacgttaccgtcataactacctgagtgatgaggagtttcgaaccttccaaaatatgctactgaaaaatccaacaacaggagatgtaatccaacatacaggcggattgcgtaaagtacgttttactgattcccgaaggaaaaagggaaaacgaggcggtattcggataatttactattggtgggtatctaaatcgcaattcatgcttttcactatctatgataaagatgaaatgtcagacttaactaaagagcaatgcgaatccttgcgtaaaatgttagaaatgagaaaaaaaggagcataaatgaagcgtgatctatttgcagaactcaatgaagggatgaaagcttgggaagaggctaacgaaggcaaactcacattgaaaactcataagaggaggttaaaaaatgatatcttcatcagtccggatgagttgaaatctatccggagtaaactgaatatttctcaggctgtttttgcccagtacctgcataccggtgagacgacataccaaaactgggaacagggacgggctaaaccgaataaacaagctgtgttactgattaaaatggtggagcgcaacccgcaggcactagaatttcttgccagcctcacataacaatatcactttaattcatgtagctgagcattcacttttaacaatttcacgcaatgtaaatgggtgaaacttgacggtgatctcaccatcagtgatagctaaggtcggattaggcaaccgctcttgttcccctttgggttgactctctttaacagaaaaacctgccggcaaaggttgcggtaataatgcttttgcggctgttgataagatctcaggtgccaccggcagcaccagctccacatgttcccatccctgatgcaagtaagttttcttgccaggatagggcaattctacacaatcaatttgccaattaagcaccgcaattgggtactctaaatcaaacaagcagattggacgtccattaatgatagtttctgacatcaaactgccacattgcaaaaaacctttacgccagcgctccgctacagagatatcgtgacaacgtaaggagatatgatcggcttgatattgctcaacattcaaattaagccgttgtttgaaccgtaccaatttttgctcaaatattgccagttcagccactaaatcctgtaattcaacaatagaagaaaaatgtgtcatattatcccagttaagatgcaatagattggtcccttccctggccccaaacagcccaagaattttaaagggttgccgccgtttcaaacctcaaatgatactctcgattggtaataattgaaattcgatggtaccaacacaatcactctttcaataattccatgaattctcattaccctatttcacccacaaaaaactgcaattaagagcctatctcaataggcgtaattgttgcagaccattcttatcaatgaacagtgaacacggacagcgcggaaaaaccggagcgtacacgtagtacgtgaggattttgagcactgcccaggttcgctctttatggcaaagaaaggcaaataaaatagctctattgggataggcagtaagcgaaaaaatccgcttgggacaatgtttgataccttgcaagaaacactatctatcaataagttactatacctgttatctttcaagttgcctctttgttggctgcactctctcaccccggtcacatcgttatctatgctcccggggattcgctcccttgccgtcgcgatccatcttgaaatccattgggtatataaccattttattttacacaatttccgcacgtaatgggaattaagggtaattaagggtaattctggttttataatataattagattaggaaattaaaaataggaatattattcttttattctaacgattcaggacaattatttaaaataaaaaataatcacaaagtttatcattcaatataaaattaagaatctataaaaaaaacaaaaataaaaagcaaaaattacaatattaaaattaaccatcgatataaagattattgtaattgatacagatcacaaacactaattttctcattgaaatccaatcataaagaaaataaattacattttagtcaaatatgtaaatatctttgacaaaactatttctataaaacgtaatttcggaggtaatactatgtctgattggtcaggaagtgttccagctaacgctgaaaatggtaaatccacaggacttattctcaaacagggagatacaatctctgttgttgctcatggatgggtgaaatatggccgtgataatgttgaatgggcagcacctgatggtcctgtacccaataatccacaaccgtcatcaatagccactctcgtcgctaagatcgccaacaagaagtttgcaattggcaacggagtacttcataaaacggttcctgtagatggcgaattaatacttttattcaatgacgtaccgggtacttttggtgataattcaggtgaatttcaagtcgaggtcataatagagtctcgatactcccctttaaaataaataaaaactgtgtgaatatatattaccaataaagtaataaacatttttattgatataatgccaagtgaaaaatcacactatttcacttggcagatgtcatcccacaattctctgtccttattattcggttaatgcagttgcaataagatcttatctacccaaaaaccacatacaatcaattacattaaagctgtatataaaaacagtatcatccatgacatcaactgaaaagaaagttttgcctatcaacaaaacaggccacgcaatgcgcagcccttaataaattacactaccgaactaagtcatcagcgtattacttttcccggacaccttcgatagaaatcaataaatctgcttcctgtgatttaggtcccaaatctgctttgaaattaaagtctttcagtttgattttaccagaagcttcaaaacctgcgcgataaccaccccacgggtctttaccttcacccatcagctctgcattcagtatcaccggctttgtcacaccgtttaaagtcagatcacccgtaacaacatatttctcgccctcttttttcacttcagttgacgtgaattttgcttcagggtatttctctgtattaaagtaatctttactacgcaggtgtttatcacgttcggcgtggttagtgtccaaactggctattttgatcgtcacattaactttattttccgccggattttgctcatcaaatgtgaaagaaccatcaaaatctttaaatgtcccatatagccagctataccccaaatgctgaatgcgaaatccaataaaggcatgctggccgggtatatcaattttataattggcagctaatgcagaacttgcatttagtaacaatgcacccgcagtcaggccaagtagcgtcttcttcaacatattcttctccataatcgtcttttatattattcaggacggaaacccagtatccgctttaaggttgcatcacgatcaataaaatggtgttttaatgctgcaacagcatgtaataacgataaaattaccactgcccaagcaaggtaaagatgaatcattccagcagtatccgcctgttcaccctgaccgattaatgtagctggcacaataaaccagtcaaaaacagaaattggctgaccatcagcggtcgaaattaaataaccactaatcaaaatgccaaacagtaagatatacaacaaaatatgcattaaaaccgcgctgactctaatcaggcgactataactggctaatggcttgggtggtggagaaacaaaacgccagataacacgcacagccatcatgataaacagcaacatcccgatacttttatgaatttcaggtgctttatgataccacgtatcgtaataccctaatgtcaccatccacagtcctagcgcaaacatgccatatacgatcaatgcaaccagccaatgtaaaaggacagataagtgaccaaactggttggaagtattcttccaaagcataacagttccttttttaggtaaatgtagactagccattttttgaactaattcaattatgaatgatattaatctcttttttattaaaaatcccaacaaataatttgcaaaagattttcaattttaatcaataaaactcatttaaggtaaaaaaaacattaagtaacaataagataaaaataaatcacattaataataatgtcgaaaaaatatataatatatatttttttattatatttgactttaaatttcaactaccgtaaaaatcaattatcttattttctattatttctttataattttccgcctataagaatcgtaacctgatgcactcgtatctggcgagtctaacacaagcctggaacaataaaagggtatatacccgtcatctttcaagttgcctctttgttggctacactcgctcaccccggtcacatagtttgctatgctctcggggattcactcccttgccgtcgcgatccatcttgaaatccatagggtataaaacatgaggaacatcactgtttacggcagcaaatcttacagcattaatcatacaatagtggtaaaaataacatcaataaattatcaaaaatgaggttttttatgtcaaatagcattttacaagcactcacggtgttgaagtcaaaaaaatgggtcgatttgacgcatagcttcgataaagattctccacatttttttatgcttgattcagcagaatttaaaacactgtttgattataaggatggcttttttactcagcaattttcttttcccggccaatatgggactcacattgatgctccctgccactttgttcctgatacccgttatgtcgatgaattggaattaaaagaattagttttacctctaatcgtacttgatcaatcagaaagagcaaaacaggaccctaatttttcactttctaaagaagatattcttaaatttgaagaagaatatggaattattgaggcaggtactttcgttgcgctcagaacggattggagtaaacgctggtcatctcagaaagcaatggataataaagatgattctggcaataaccaaacacccggttgggggatagatgccctcaagtttttatttgaagaacgccatattaaagccattgggcatgaaacatttgataccgacgccgctaaagattttagaaagaataatgccttgttaggcgaagattatgtcttaaagcaagatacttatcagatagaacttttagctaatttggaccaagtacctgtacgtggcgccgttattttcaacattgtagccaaacctaaaaaagcctctggttttcctgttcgtgcgtttgccatactcccataactgcgcccctcccttatgccgtatattcattacggcattatatacccgttatctttcaagctgcctctttgttggccgcactcgctcaccccggtcacatagttacctatgctcccggggattctctcccttgccgtcgcgatccatcttgaaatccatagggtatagttaccatcatgattttgcgggaagacgcgttttttatcttcgccacttggcacaaagcaacagtaaagtggtatgtcatgtgttgaatatggtataaaacccgccgttttttcttatgaaccattttgcaaaggatattgtttgctacaatatacctatttcttgttcgtcatttaaggtaaccaggtgaatattcaggcgattctttcagaaaaagtcagccaagcgctgattgcagcaggtgctccagccgacagcgaagctcacatccgccaatccgcgaaagcgcaatttggcgactatcaggccaatggtgttatggccgccgcgaaaaaagtgggtatgcctccccgacaactggcagaaaaagttgttaacctgctaaatctgcaaggtatcgccagtaaagttgaaatcgctggtcccggctttatcaatatcttccttgataaagcatggattgcagccaatatcgaaactgcactgaaagatgaaaaactaggcgttacgccagccaaaccacaaactattgttgtcgattattccgcccccaatgtcgcgaaacagatgcacgttggtcatttgcgctccacgattattggtgatgccgccgtccgtacattggaattcctcggtcataaggttatccgcgctaaccatgtgggtgactggggaacccagttcggtatgctaattgcctatttggaaaaagtgcaaaatgaaaatgccagcgatatggcattgtccgatctggaagcgttctatcgcgaagcgaaaaagcattacgatgaagatgaagagtttgccatccgcgcccgtggctatgtggtgaaactgcaaggcggtgatgaatattgccgcaccatgtggcgcaagctagtggatatcacgatggcccaaaatcagcaaacctatgatcgtctgaatgtcacgctgactaaagattctgtcatgggtgaaagtctgtacaacgatctgctgcccagtattgtcgcggatctgaaacagcaagggctggcagtagaaagcgatggtgcaaccgtagtttaccttgatgaatataaaaacaaagaaggtgaaccgatgggcgttattatccaaaaacaggatggaggttatctttacaccacaaccgatatcgcctgtgcaaaataccgttatgaaaccctgcacgcggaccgcattctttactacatcgattcccgtcaacatcaacatttgatgcaagcctggaccatcgttcgtaaagcgggttatgtaccagaatccgtgtcactggaacaccatatgttcggcatgatgttgggcaaagatagcaaaccatttaaaactcgcgccggcggtactgtcagattgaccgatctattggatgaagctattgaacgtgccaacacccttatccgtgaaaagaacccggatatgccagaagatgaattgaaaaaagtggtttctgctgtcggtatcggtgccgtgaaatacgctgatctctccaagagccgtaccacagattacatcttcgattgggataatatgctcgcttttgaaggcaataccgcaccttatatgcaatatgcttacacccgtgttgcctccatctttaaacgtgccgaaatcgatgaaagcagtctgaccctaccggttatcctaaatgaagatcgtgaacaaacattggccacccgtttattacaatttgaagagaccatcaccaccgtcgcccgtgaaggtacgccacatgtgatgtgtgcttacctgtacgatttggctggtctattctcctgtttctatgaacactgccaaattcttaatgcggaaagtgaagagttgcgtcaaagccgcctaaagctggcgctcctgactgctaagacattgaagcaaggtctgaatacattgggtattgagacggtagaacggatgtaacaggataatcgttgtttttctgaaaaattggcgtgattgggaatatctattattgccttatcacgcctgtcacaataggcaccgccacgcttcatcatccccaacgcgaccgccactcgctgagcgaatcccggttgttgcaattaatgtccatatatacccgtcatctttcaagttgcctccttgttggctacacccactcaccccgtcacatcgttatctatgctcccggggattcgctcccttgccgtcgcgatgcttcttgaaatctataaggtatagacttattagctgatatcccggtaacctcagaaaactcaagctcagcttgagctaacaataactaccgggatacctcaatttattaaaaactgcggtgggcaaaatcttttagccgaaaacccatcagcaccaacgcagcaaaatagctgcttgccccagcgataacaaccaccatcaatcgcaacaggcgcgtagccatatttccctgctcccatgctggcatcaaccataaagtaacagctaatacggcaatcattaccgtaattgccacaaccagtttaaataagaacctcccccaacccgctaacggcttaaaaatatttttcttacgtaattgccagtaaagcagactagcattgaaacaagatgccagaccaatagacaaggctaacccagcatgtttcagcgggccaacaaaggcaaggttcattaactgagtcaaaatcaaagtgacaatcgcaattttcaccggcgttttaatatctcgacgagaataaaaacccggtgccagtaccttaacaataattagccccatcagtccaaaacagtaagcaatcaacgctttttgagtcattactgcatcaaatgccgtaaaattaccgtattggaatagagaaactgttaaaggttctgccagcatacctaaagcaacagcacaaggcagcgctaataaaaaacagagccgcagcccccaatccattaatttggtgtactcctcatgatttccactggaaaaacttttcgctaatgaaggtaaaagaattgttccaagcgcaacacccaatacaccagagggtaattccatcaaacggtcagcgtaatacatccaggagacagaaccggacaccagaaatgaggcgaaaatcgtattaataattaatgaaatctggccgactgaaaccccaagaattgcaggccccatctgccgcataacccgccatacgccgctgtcacgaaaagaaatacgcggtaataccagcatgccaatcttttttaaatgaggaagctgatataagagctgtaaaatccctcctgcaaccaccgcccaacccaatgccatcaccggcggattacaataaggggcgacaaataatgcaaacacaatcatgctgatattaagtaatgttggagcgaaggcaggaacagaaaatcgattccaggtatttaatatcgcacctgccaacgaggccagtgatatcagaaaaatatagggaaaagtaattcttaacaaatttgttgtcagcgtaaatttatcggcggtatcggtaaaaccgggtgcggtaacataaatcacccacggtgctgccaaaactcccagtacagtaacaatggccagaattaacgtcagcataccggaaacataagcaataaacgtccgagtcgcttcatcaccttgctgattcttatattccgccaaaatgggcacaaatgcctgagaaaaggcaccttctgcaaaaatacggcgcagtaaattaggcagtttaaatgcaacaaaaaaagcatccgctgcaacaccagccccaaatatgcgggcaataatggcatctcggataaagcctaaaacccgagagaacatggtcatagagctaaccgcagccagcgatttcaataaattcatcgtatttatctcaaaatcatgttagttaatttccgaactgcctgtacgtcagtgcaaaaatggaaaatggattatacccgttatccttcaagttgcctctttgttggctacactcgctcaccccggtcacatcgttacctatgctcccggggactctctcccttgccgtcgcgatgcatcttgaaatccatagggtatatacacgactgagatacttgtgaactgtcggtactttttaagttgcctgtattagggcaaaaaaccaccaaatcacaccctcttaatccagcttgctaagctatcttttaaaatcaataaattattatttaatataaaatcatgtacgaactcaagttatatgaatatttattttcactcactctttatttatctattttttctattcaattactattatcccaaaaatataaaatcaaagttagcatttatcaaataattatgaaacggaatttcagcacttattaaataaaccaattagaataacacctatttttatgtaactaagaaaccattaaaattattttcatgataaatgaattactcggaaatatttatttacagagtagcgatattgtacttattatatgaatctaccatggttaatcattcactttgttaacaaaatcggcgagtatgcataaattcattctcatacactagaaatcattaacttttataatttgccaatgtaacattgtatttggcctaaatgatggtaccttgcaactagccttactacagaaagcccaaatagccacttcgaaaaacgcaccaaccgaagtcagtgcgtcaaataaatcaactcattgaagcttactcatttctaagctgcctgtacggcagtgaacgagatgagattatagccaccgggtttacttgctttctaagctgcctgtacggcagtgaactatcggcccggcaacacttagcccttcaaaagtttctaagctgcctgtacggcagtgaactgttgatgtattcattttgatcccctttaatatttctaagctgcctgtacggcagtgaacccagctactacgttgttcttaagaataaacaatttctaagctgcctgtacggcagtgaactgggaatacttgtctttggtatcgttcttacatttctaagctgcctgtacggcagtgaactgttacatattaactttaagctactgacaattaaagcatatattgataaaacaatgaaaaaacccttttttacaagagaaataatatcccattaaaaatcaatagattaaaatccactctcaaaaaagggtcaaaaataaggggtggagaaggcagattttcaacagtgatttaattcatcattaccaatttgctttactttatttggtgacagtacagcgtaataatcaactttttccactccatttttcatctgtcaatgcggttaatacgtgatcctgccaaactccattaatcatcaggtatttcttagcatagccttcacgttcaaaacccaatcgttccaacaacttcccactacgatgattatccggcatataattagccataatccgatgcatcccctgttggcgttgcatataacggatagctggttgtaaagcttcgtacatcatcccttttccctgccacttttcaccaagcgaatatcccaaataacaggcatgaaaagccccacgcagaatattactgaaattggcaacaccaataacttcactctcatttgaatcaagcagcagaaaatgaaaagccgcactctgtctttgcatttctatgattaaattcaatcgatttatccaaccggaaggctggcaatgacttctatctctagtcggctcccaaggtttaagaaactcgtgattttctgaatagtactcagccaaacgataagcatcccgctcgtacaccaaacgcaccaccattcgttccgtaatcagacgaactttcggtaaagtggaacgataaccaaacattatttctccctagctctgttaatttatccgttaaaaatttaagtgatttatctgtaaaaaacagcttccactcattactttacgacaaaaaaatattatccataattcactatcctaatgttcgaattaagtacagaatataaaagaactgtattgtcctctcttcttaattactccaatggtgagcaatgtcactggtttcacaagcacgtagcctgggtaagtacttcctgttattcgataacttgctggtcgttctaggtttcttcgtcgtttttcctttaatatcaatacattttgttgagcaactgggttgggccgcgctggttgtcggttttgcgcttggtttacgtcagtttgtacaacaaggtttaggcatttttggtggcgcaattgcagaccgttttggcgcgaagccgatgatcgtcaccggcatgctgttacgcgcccttggttttgctttcatcgccttagccaccgaaccgtggatactgtggcttgcctgtatattatccgcactgggaggtaccttatttgatcctccccggactgcactggtcatcaaactaacccgaccgcacgaacgtggccgtttcttctcgctgctgttaatgcaggacagtgccggtgcggttatcggcgcactgattggtagctggctgctgcaatatgatttccaatttgtctgctggacaggtgccggtgtttttgttctggcagccatctggaatgcattattcctccctgcctaccggatttctactactcgaactcccatctgggaagggatggagcgcgttattaaagatcgtcgcttcttcacctatgtattgacgttaaccggctattttatgctgtctgtccaagtgatgttaatgttcccaattatcgtcaacgaaatcgccggcacacccgctgcggtaaaatggatgtacgcaattgaagcaaccctatcactcactttgctgtatccaatcgcccgttggagcgaaaaacgattccggctagaacagcgtctaatggccgggcttttcctgatgagcctgagtatgttcccagtcggtttgattggtgaaataaataccttatttggccttatttgcctgttctatctcggcaccgttaccgctgaacctgcccgtgagacattaagtgcttcactcgctgatccacgtgcgcgtgggagttatatgggattcagccgtcttggtctggcattgggtggtgccttgggttataccggcggtggttggttatatgataccggccatgcgctgaatattccgcaattgccttggtttctgcttgggattattggcttgataacgctgtatgccctgcaccgtcaatttaaccaacgtaagattgaatctgccatgctgagtggcaattaatgaggtaaaatctgccctccaaaataaaggagtcgatatgagaaaatttttcttgggggcagtattgctgctagtggggttaatcagtggttgtgatcagttcaaagatatcagtatcagcgaagagttaattaatggttatctagcaaagcacgtccattaccagaaacagctcgaattacatggtattgccaatgcggatattgaattgacagaactctccagccaaattggtcgaacagaaccaaataaaatagcattaactggccgtgcaaatgtcaatgttacatccttgcttggcccggctaaagccgatatgaaactcagcctgaaagcacaacctgtttttgatcaggaaaaaggggctatttttctgaaagagttggaaatcgttgattaccaaatcacaccggaaaaaatggaaaaaccgattaacgcattagttccttatctgaataaatcactcagcgctttctttgatattcatcctatttatgtaataaaagcagatcatagtaaagctgaagccgcagctaaaacattagcaaaaaggttagaagtgaagcctggcaaattagttattatgctgaccgataaataatcttcatcaagatatataccctatggatttcaagatacatcgcgacggcaagggagcgaatccccgggagcatagataacgatgtgaccggggtgagtgagtgcagccaacaaagaagcaacttgaaagatgacggatatagcaaaaaggcaaataattcgaagttatttgcctttttatcatttaaacattaagaatccagttcttctcttaacgcctgtaacgcttcacgggtaatcattgctaatgttcggtagaaactggttattgcatgggcttccactttccccaaaaattgcccacaccacggcagcaaatattcatcaaacagcataatttgcccctgaacctcatcttctgctgcctgatcttccagccatgaagcccctaataacagagaaccaaactgatcgacaggcccatcggacaatggcatgcctcgttcaatcaaaaattgacgaatatcgttttcactctccccggtatagtcagaacggcggctcggtacgctagcattatctccataaaacagtgccatataatcagcttgcattgcggatagatcgcagttttgttgcaaacgatccaacaatgcatcttgctccaatggccatgattgcttcaatttaccttcgacaatcaccgtcagaagtggtttcagaatcgggtcttgcggttgacgattaaataaagtccctaaaatacggcagactattgaaaattcattcatctcagtttccaaataaatagcaattttgccgttattgtctccaatagctgcccctactgtaaagagacgttattaatatcctagttttatatccacaacgccggttgataattctcctttttcaattcgtcgaatattttcactaatcgtatccatagcaatatcaggaatagtaatagccgcaacatgtggcgtcaccgttatacgggggtgagtccagaacgggtgcatctctggtagtggttcctcaacaaacacatccaatgaagccccgacgatataacctttatcaatcgccaccaacagatcatgttctactaaatgggcacctcgcgcgatattaatcagatatgactttggttttagctggctaaacagcgataaattcagaataccacgggtttttggtgtatcgggcagcaaattgataagcaccttactgccggagagaaaatcgcccaattgatcttcaccgtgaaagctaactacgttattaatctgttttggagtgcggctccaacaacgcacaataaagccccattcaactaacgtctgtgcaacacggcgacccagaacaccggcacccaacacacccacaacaaaatctttgcgatcataaggttcgagttgtttccacctcctctgcccttgttgcagcttatactcatccatgcgccgcaaataatgtaaaaccattgctaccgcatactcctgcatttgcagccccatacctgcatcttcaagccgcatcagtggcacaccggcgggtaacatccctggtttttgctgttcctgctttaaaatcgcctctacacctgctcctaaaataaaaatccccttcaatccagagcgatttgccaacatctcataggggggagcccaaaccattgcataatccgcatgcttattatcgccgcgtttccattggcggatattgatattgggtaatcgttgctgcataccttgaatccactgagcagcatcaaaaaaggggtggtaaaagataatctccatgactatttatcctcatcatcttacattttcatatagggttatctgatgattgagtataggttgcaagaccctttgttaatcatcattacgaaaattttgagaatgttaagtagttaacgaattcatttttttcttatcaaaagacttgtacattttctatttcagcgacaccagatggatatcaattcaccgaattgactcttatttagctaaccaatcaaaaaaccaaagaaaaatatcagaagagtgttgacgcttgtaacgcttttccctatagtagcgccccgttgcagcgacgatgttagacaaagttactggaatgaaaaaaatggtgaggtgtccgagaggctgaaggagcacgcctggaaagtgtgtatacgtgaaaacgtatcgagggttcgaatccctccctcaccgccagaattgaagagaagctcaggttaaatacctgggctttttacttatatatacctccgatgcagggagggtcgagaaccctcgaacagggttcgacaaaacggcttgccgttttggaccgccaacggcggcccgcagggtgagcgcagcgaatccatccctccctcaccgccaaattcgaaagaaagctcaggttaaatacctgggcttttttcttatatggacattacaattaccatttcaggaaattggcgtgtgacattcgaatttatcgatagtgatgcgtacatcgttaactacgaggattatcactaatgaaaatgtttaacccacctcacccaggcgaaattattgctgactctttggaagaactaggtttaggaattcgtgatctagcgcgagcactaaatgttgctccatctacggctcaacgtttagtgtcgtgcaaagcagcagttacaccagagatggcaataaaactgtcaaaagtacttggtagctctccacggctgtggctaaaactgcaagaaacttatagcctcgataaagcagaaaagacggttgatatttccaaactgactccgttatttaagcctgtccatttatctcacacctaaaagtcaacaacctgagctcaggttaccacctgggctttttactttcataacaccaaaacggcaatatatttacctcgaaagccttggacaaaagatgtcaactatcaaatgttgggactaaacagatataaaaaaccacccgaaggtggctattgccgtttcaaacatcttcatccagtttttcacgatctaattccagtaattcttggaattcctttaatccccttaattcctggattttattctctaaatcggggatcgtatgaacatctggactcgtataaatcagtcgactggtttctatgccttctttgccacacattatatgtatatcaactaataccgtattattatcataacctatagacatagttccattgtattttagcgcattttcaaattcttcttgtgatggatacgatgattcatctccgtactttttcgttaacgatttgcttactggcttcacgaggcggccaatattaatctctaatcttttaaattttccatttaaaaaaaatgccattgcttcacgctttttgttagcaaacgaaaagtcagaacatgaataaagtgatacttcttctatttgagaatttccctcaaatttttcaaaatcacataatcttttcgaaagaaattcttcttctgtcatgccaaactttgcatctttatacccatcaactgccattgcaccaaagctaatcattcccaatgcaagcataactgctaattttttcatattatctccttttgctttgagcaatataacaatgaaaatagtgttaagccaacccccacaaacctctatcaagtccccaaatgcagatgttttggagaattttttcgctatgctcccgggaattcactcccttgccatcgcgatgcatcttaaaatccatagagtatatcaactattaaatgcttggtttaagcttaaagcacaccctttctgtgccctcgtattgacgcgacgtaaaatctcaacaagtacaccaggatattgaccatattctctgctcattatcccgacatcatcggtaacaataaatgccggataactcgttgatgacgcatccatataactcatcaaacccggcattccatcaggtacaggtttcaatgtttcaggatcaagtgctcgcgcatatacccacggcggaacacgtttacgttgcatttcatcctcaaagaaacaagtgttgagttcaacttgattaaatatatcgcggatttgactaatattattgaggttgaacgtgtcgaataaaagatgattgaaatcatcgcgttttagggactctttttcataacttttccagccgccccccgttatgatataaaggtttttatccccataaaatgagatatttttatctttcatatactggcagagcaaataaataaagtatggtgagccgataagacaaatatcttttccttgattttttattcgctcaaggctattcaatgtcttaacaaaatctattcgttcttccattacggtaaatgtcgtgggatataataattctaccaagctcataacatatttaaaccaaatgttatgagcattaaatctatctggccctaagttgaccaactctatttgatgatcaaaccaactaccaacatatttcatgccataactcacagagcctaagagtctctcaatacttagtctgttacgcgccacctgactttttaaaccactcgtgccgctgctggtaaaccaactttcaatctcgttctcctgagaagttaataagcgagtaaacttaaaaactgatgttgggaatacaggtatgtcatcaatttccgtaatattgtcgtctactttgtgtacctgacagtagtgacggtattcttgacaatgtttatagtgattacgaaatgcatcaagaacaaatttgtttctgattttttcctgttcatcgtaagaccaagctaatggatcgctggaaaaaatcaaatcatcaatttctgagcttgctatgatctcttgtttatcaacatatgaagtcatacctgttttacccctccaaataatttagagaatatggcagcgttgctgccatattcttttactacatgtggtactttttaatattatcattaacaatattgattacgtttttttggtgcatcaagtcattcattggttcaaaagataacaatacactttttgcaccgcacttttcaattgccagcttagccgcagctatacattccgtataatctccgacagcgttttctgtgattatctcttcaagtttattttcgagattttcattaggatacatttcaagaacataatcacggataaatgcacgcgtctcttgtttagctttgtgactatcttcgttatagttaaccaataccattaactgatgatctatcgctgataagtcaataccatatttatcagcaacggctttatacctttcagcatattcatatctaacatcattggagtcatcccacttaaagatgagaggaatgccttttttagccgcccactcaacaatatgatgactggttgctgtgacatatctccgaggcccgccttgggtataagcgtgggggtttaccgatattttagggaaactataaaaatcattatcgggattacaatagcctgttgttaaagcatcgttaatgatttcataacactcttcaaatagttgctgttgatattcaacagggcgattaaaaagacgcatttcatcttttttttcacaatcactaaaccctaaaataaatctcccttcgcttaattgatccaataagcaagcctcctccgctattcggacaggatgatgagttgtaatgatgtgattcaatgagccaattttaattttttctgttaaaccgagcaaaaaaccagaaacagtcagaggagcaccgacaacaccattacctgaaaaatgattttcatacaccaaaatctgttcaaaattcaacttatcaacatactctgttatttcctgcatgcgaactatactttgttcttgaacagttgttgaattgatgaagttaaggaagaacaatccaaatttcatttctttttccttagctactataatagcgaacgttgtttttctttaagaaacggcatgacatcagactggaagagcttcatggaagcaataatttcgtctactgttccattcgcttcaaacccacaacagatatttgatattcccgtggcatcaatgtctttttgaattatgtcaatgcattcctgcggggttcccacgggattgatttcgtaactgtaatcaatgcggcgattagtatctctatgtccctttaatacaaagtcacgccactgccctttattgaaatcataacctcttgttttgtctgaatcatcaaaaatggtcgtggcattcacataagaatcataccaatgccctagaaaatcccgacaaatctcttgcgctttatttgagtcataatttacagatgttatatatgataagcaatggtcgatattatgaatatcgtgcccatattcttgagccacctcgttataaagctcaagctgtgctttcttttcgttagtatttataatccaacttaatatcatcggtaaaccaaattgagcggcccattcagttgtcgaggctgattcagcaaccacataaacaggggctccacctttactatatgctgtcgggtttacttttaccttatggaacttgatatgttcattatcagcttccatatatccctctgtcatgccattttttatcaacccgtaccagcactccgttaaagcgcgactgttattcatatccgtgccaaatacgcgaaagtctttattgtaaagcccccgacaaataccaaaccgaaatcgtccttttgacatttgatccaataaattcacatcttcaagttggcgcactggatgagcggtgggaagaacaatagccgcagtccctacattcaattttttggttgcaccaagtaaatatgcagcagcgacataagggttaccaagcaaaccaaactccgtgaaatgatgctccagtaaccatacagtatcaaaaccacactcctcagaaatacgacctaatttaaccaaacgtttcattacttctgtttgagaaaattgggggggttggtatgtaagcaaaaagtttccaaatttcatagagagcccttatatttgagtgatagaattaactatacccgttatctttcaagttgcttctttgttggctgcactcactcaccccggtcacatagtttgctatgctcccgggattcgctcccttgccgtcgcgatccatcttgaaatctatagggtaatatctatcccaataggttttaagacagcgaaatcgcttgattttcaatctcaattttcattcgacgttcattgactgtcgcaatagttagatgttcgaatgatggttcaataatatcaacatcaatatccagacgatcattatccatcgcgatagcagccttcgtaaccgattgataaaaattgcgcaggaccactaagttttcacccaagtcatgcgaactccctagcaaagaatatatcttgcatcgattactacgaatatttgataacaatgtgataacttcatcttgctttacccaattgtcgttatttgcagtaaaagcaataaacggtatatcaagatacatcatgctattgattgtagaagttaaatcttcccagccaaaatcaaggcaatctctcgcaaagacttcagcacccaatttatggccttcaaaatccaaattattcggcaattcattaatgggtaaactgagataatcaaatcctaaagctctttcaagcgtatatcttaagttaacaacaccgactgcggtgattaaaaatgaaacattaatttcagatagacttgcataaactatccgtgcagataagcttgaagccaaaataccacggttatttatttttcgtgtatttaaccaatcaaccacggctaataggctctgttttcctatagacattgtaaattcatcaattgtccctgaactcaacccaacgtggtgaagtgaatcatagcgaatcacatgaaacccattccgcgataaatattccgctaaaccagcaaaatgatccatccttcgggcaaaacccgacgcaataataatggtattctttctctttgggctgttttcttctggcagcgtttcccaaacatgaatttttttatttccttcaacacaaagaacatggtcgatggttttatatttggatttattttccatactttttacctattacgggacaaatacaaggaacttatcttcttccaggaatcgagtctgttctatttcaaccgcaacatccttagcagtataatgagatggcctctcatgagaaatatatgtcactaatcgttgtaacggcctcattccgtcatgagatccaccaactcgaaatatattattcattcctgcttctacaatcctttccgcacctcttaatgccaacgcatctcgatacttaaatgcggattcccaaggaaaaatagatatggtttgtgtcttatttttttgaacataaggcaatacttgctcaatattatcgacgtgatgaagatacacacatctgccaagtggttgattaaattccacacccgcatttgactcaataatcatccaacgttgatgaacatccacctctacttttaatccagcaaataagctctctttttggactaaagaataggccgccttttcatcaaaatcttttttggcgtttggtaatatatgcgcatatagattaagtttttctatcaacgctaacttaaattcctcatactgatttcccatgtaatatatgttttgggcagaaaaacaagcgcgctgatcgtaaaaacaaatatcatgagccgcaccggtagctgctgacgttaaatcaactggattatcaataatgcaaaaactctttttagagccaaatttaatcacgtcagcatagggtggtgcatgttctacagcccaattaatcgcatcttcccctccccaagcgacaataacatccatatgttgcataatttcttttgcgagtgatgtatcaccttggtgtggccaatatacaacagacaaagagcgcgttatcggatgattagggtctacatcgataaagcttaacgctaatgcattagcggtaaagggatcggttgacgatgtttttataatacactgattcttggttaaaattgcgcgtaatatagacatgatcccagataatggaacattacctgccaacagatgtatagacttacctttcggaaaagccttaatataactttcatcctgaggtagccattcatccatgatatggcgagaaccaagttcattttctacaacatcataaaggccacctttagaacataaaatcatagatatccagttggcctctaacttggccattgcttctgaatatcccatatatttttttaaatcacgaatgtatgtcctgcgtcttgaatattcttcatttttccatctttgccctaccgtatagagaaaattgacaatattatgcaaccgtaatttattattttcattataatcaataatgttttttacatgagaattattcaatattggcaggtaaacactattatcaccaaaattaatggattgcactaaatcatcactttcgggaaaaatttcaacctggccgttaataatgaatgaaatttttttagtcatattagccatccatttaatggggtaacttcaacttaagttattgtttaatcatcttgcaaactggttgtaccaatatttgcttcttgtatttttatgttacaacgataaaaataaaaagaatatccagaaaataagattttttattataataatctcaatctataagtttcgttagaaataataacgccctgaattttatgctcaaaactattaatgtaacttcgcgctcataaatataattcctgttccatttgtaatgtctgtaaaatagcaaaggaaactttttatatcaacaaaatttattaataaaaatttaaattaaagaaatcaagctcttctttatatacaaatattcatgaaactgattaaactgattcttcatttaataactccttatgctatttctctcataccgagagaatacattgaatggcaatgccgctttccaccagcaaatttctagaagaagagctcaagttcaaaatacctgagctctttgtgtatatagcccgcccctccaattaaagcaataaatttagctactttttgaggtgtgccgcggcttgtcgtacagcatcatagtagctggctggcagtatccccatacacggcgtaacagagattggcaacgtacgccaagctggcacaatttcaaaccagttagaatcataaaacagttttacttcgtggtttaaattgaattttgtgtcgtaagcaaggccagtcagttcaaaatcggtgtccgttgtctgaataagaaattcgccagggtaaatctgatgggttttctgcgaggtgccgtaaactacaatcaccgcgtgatcagtaggggatacagcgactactagcgccggtcaaggtttcggtcccggcgtcccgaccctttcaggaaaccggcaccacacaatgctgccgatagtggcaaggggagtaaacctgatagttttgtgttgctgtgccatccgttgcctctcgatcagaacaggcgttgagtaaagttatcatccgcaatgtcgctagctgcgctcgcttcacggatggtacagatctgctcatcactcaatggtccgtcatctttctcgtagtgcggtaggtagcggtcagcaaagttgcgcaaagcaaggtgtgcgatttcagttttactcagaccagtgactttaaccagttcatcgagcgtcccggcgctgatccctgtgggcgtatcctgattacgtaaacggattaagaaactggatatggtttttccttgggtattgtgcatagtgttttctccgaatcatgccaaaacaatatatatcaactctatatcatgatagcatattgatatacgttaccaaatccccatcactcccttgccgtcgcgatccatcttgaaatccattgggtatatcatatttttatattacctttgctgatcgatgataacgttatgccgcccggcaaacaatctctgttttgcaaatagaaagaatgtgtttccatatcatcaaatattatctccaaacatttttctaagatgacaaagaaacacatgttatcccaaaatcaattaactgacatttttatcaggacgccatcaggattattctttccatacgacaaatccctcaatataaagtttgtccagtgaagttttcaaaaacgtctctattgcaatctccggtgacataataagcggctgtcctctaacgttgaatgaagtattcaccagacaaccataaccggttatcttctgtacctctttcaataatcgccaaaaagttgcgttaaaagcacgttcaacaagctgaatacgcgccgttccatcagcatggacaatacctgacaccggcttcatcatttctggttttactttggcggtgcaaagcatatatcgagtcggcattaaattgcgtgtctcaaaaatagtgtcgcaatcctcatccaaaattgccggggcaaatggtcggaaagcctcacggaatttcactgtactattgattctatcttttattctttcacctgccggcaaagccaaaattgaacggttgcccagtgctcttgggccaaattccatccgatcatggaaccaagcaatgattttatcttctgcgatatctttagccgcggtcgcaaaataatcatcattcagccctaaataacgccatttcattcctgcattgccaccatgtcggaataatacattacggacttcatcggtagagaaacgaggaccgaggtaaggattaaagcaagaatcggcaccattgtgatattcaccagccacaaaaagcgcagcgcccaaagccgaaccatcatcccccgatgccggttgaacaaagacgttttccacaccatcaagctgacaaagaacttgatttgctttgcagtttaagaatgatcctccagcaagacagagtgatgtttcacccgtttttcccagccaataggttactaactgtttcagcagcagtgtaaatttttcctgtaatccggcagcaaaatcctgatgaacatcccgtaaagtgtcatcttctcttctcggcgtaaaaccaaacatatcactaagttgtgccattgcagcgggaaaaccatattccgcattatcaaatgctggcggtaaccagtttatctgtatcgttccgctctctacatcgaattgagctaattcattgaaaatatcacgatatcgttcagggttaccatacgcagaaagtcccataactttatattcatcgctattaaatacaaagccaaggaaccgggtacagatagaataaaatatgcctaatgaagagctaattggctggctgtacaatttctggaattgttggtctttagcaagataaacacttaaggattctatttcacccataccgtctgaaataatgcacaatgcagaagggaagccactaggataaaaggttgatgccgcatgagccaaatgatgatctaccccttgaaaacgcgattcaatattctgccatccctcagcagttaatgcattaatcatagtttttccactaaaaacctcctcgaataacgcttcattagacatgaaaaatcggcgataattatcataattaaaaccgtgggcaatcacctgtatatcatcttgcgtaagacctgcttccgccaaacaataattaatggcattagcaggaaaccgccctgttcctttctctcccgtaaaacgctcttccgccgccgctgcaacaatttttccatcaataatcacacaggctgcactatcgactccctggcaaatacgttcatctaatttactcacctctggattattctctcgcagaaaacgttgagcattaggaaggccactgatccctaatataatcattttcttcacctccaaattgttatttttctttcataaaaattaaactatacgctttatactgatagcccattttgtattaagtggaatcaagttaccttgccaaacaaagtaatggcattgttaccaccgaaaccaaatgcattattttatgtatttaaaattattcttcatttctatttaatgagtgattaaattaaatttaaattcaacaccctccggcaaaatatatattgaaaaacgcattccaactaactacctgcaacaattacgactattgggatagactctcatttacccagaaaaataactcataaacaatataaaagtaaagatatctgataatcagtttcatacccgtcatcttccaaattgccctttgttggctgcactcactcaccccggtcacatcgttatctatgctcccagggattcgctcccttgccgcgaagcatcttgaaatccatagggtacagattctattaaaaatagcgaagccaacattgaaataataaccttttctcattaaaacgattggcaatattcagccaggtgaagaaatatatttattataaatccaatctgctattttagctattaaccacttaatcccccatcaatgcaaagagatgttcctgtaatataggttgatgtactcaacgtccccacacaaaaactggcaatttcattaatatctgccattcgtcttaatgcggtgcttctagcgaattccatcttcttttctggggaaatatgacgcaacataccaccatcaacatatcccggcatgacagtgtaggccctaatattaaaacggccatagtcattagagatgttttttaccaatgcattcatggcggctttcgaacaagaataagcggtggcaccggtctctccacgtaaacttgctgtagaagagataaattgcatcacgccattacgattcttcataaaatgtggcagcaaatattttgctactcttgctgcaccaaataagttgacattaaaaacgtcatgccaaccctcaatatcctgagcatgcaataaaccatccaatgagattgccggtgtatagataaccgcgtcaatacatttcatcttctcaactgcaatgccaatggcttctctaacactgttatccgacataacatctaaataaatttcttcattacgcggtttacgtgaagtgcctaatacttcataaccacttgcaaccgcatgccggcaaattgcattcccaatttcacttgatgagccaataataagtatcttgctgttatatttatgcatttaaacattcctaccttatctaaaagttattttccaacagtaaaccctactttaaataaagcattcagaataaatattatctaaacaaaaaaacattattaatttatatattattaacgtatatattttagcttacctattttcaactcacttgttccatctaattctatgagtcaccctaaataatagggtgagttcttatatctgtcaaattattaatctaatatttaagcgatatcaacgcattggttaaattacatccaaaaattaaataaaaaatattatgcgtaaaaacattcaatatagctaatttaattcagtcataatcaatacatgtggtgaatgcataattaattatttaactccctaacaataacaattaaaaattgttatcaattatgttaattaattataaaaatgaaatattataatgctataattaatagaataaacatctggcttcaattttaaaaatattaatcagattctttatggaattaattcaataatattcaccaataagaatagattcttaatagaatcgatttcagcatatctcccaatgataaaaatgctattctcccttttactttttactttcctgccgttaagctattaacattaagtttgctctatggcactatcattttgaactaaaagcactatttttataattcggctttgtaatttggccttgcaatttgtctgtaacgaccttattacttttttccctctatatttttggtttatgcacagatgaaaactcgtagaatgaacggcatacggccgtttagtgctgtaattgatgcttgttggaaggaatcttactcttttgctcgtttaactaaagatattattgccggtattactgtcggtattatcgccatcccgctcgctatggcgctagccatcggcagtggtgtcgcgccacagtatgggctttataccgccgctatcgccgggatagttatcgcgataaccggcggctcacgctatagtgtttccggccctaccgccgctttcgttgtcattctctatccggtctctcaacaatttggtctgagtggtttgctcattgcaacattaatgtcaggcattattttgctggtgatgggattagcccgctttggtaaattgatcgagtatattccgctacccgtcacactcggttttacttctggaatcgcgataactatcgcaaccatgcaagtaaaagatttttttggtctgcaattggaacatatgccagagaattatatcaataaggttgtggctctgtttcaagctctgccaacgctgtatgtgagtgatacgctgattggcctgacgacacttgctgttctgatttattggcctaagcttaggctgaaattacccgggcatcttcctgctctcattgcaggaactgctgtgatggggatcatgaacttattcgatcaacatgttgctactattggttctgaatttagttatatattgaatgatggtacacaagggcaaggtatccctcccatcctaccgcaatttgttttaccgtggcatttacctgatatgggtgctcatcaggttgatataagttggtcaacggtttcagccctattacccgccgccttttcaatggcaatgttaggtgccattgagtcactgctttgtgccgtggttttggatggtatgaccggtaagaagcatcactcaaacagtgaattgattggtcaagggttgggaaatattgccgcaccattcttcggtggcattacagctaccgccgcaatcgcccgctcagccgccaatatcagagccggcgcaacatcaccggtttcagccattgttcactctctgctcgtgttattgactttactggcattggcccccatgctctcctatcttcctctggccgctatgtctgccttgttgcttatggtcgcctggaatatgagtgaaatacataaagttatcgatctgatccgccgtgcaccaagggatgacattattgtgctggtgctttgtatgtcgctcacggtgctgtttgatatggttatcgcaattacgatcggtatcgtattagcttcactgctgtttatgcgtcgaatagctaatatgactcgcatcagtcaattgccacaaaccaatgtcgataaagctctgctggttgttcgtatcaatggcccgctattctttgccgccgctgaacgtatcttcaccgaattaaaggaagaaagcgccagttatcagacaattctcatgcaatgggatgccgttcctgtgctagatgccggtgggctgcacgctttccagcgttttattgatgaagtgggtaaggataaatatattgctgtttgtgatattccatttcagccgttaaaaacactggccagagccagaatacaattgattgaaaatcaccttagctttcatgcaacattgccacgagcaatggaagagttgaatttcaatagcaaaacagttaactaaaacccgataaagagtcgtttaacttttttcaacataatggcgctgtaaaccagcgccaaatctattcatcaccaaatctcgccatcatttgatgtcatggcatcaaaaagccattttatttactggtatccagttgagggaaacttttcaccacatcatcaatcgctttcatctggctcaagaatggctcaagttttgccaacggcaatgctgatggaccatcgcacattgcattcgccggatcaggatgcgcttcaaggaacaagccagcaatgccgactgccattcccgcacgcgccagttcagcaacctgagcacgacgaccaccagacgctgcaccaaatggatcgcggcattggagtgaatgagtgacatcaaaaatgaccggatgcccccccgttgcctgagccataacattgaagcccaacatatccaccaccaaattgtcataaccaaagttgctgccacggtcacataagatcacctgatcgttgccgccctctttgaatttatccacaatatttcccatctgacccgggctaataaactggggttttttaacgttgatcaccgcaccggtacgcgccatcgcctcaactaaatcagtctgacgcgccagaaatgccggcagttggatgacatcaaccacttccgccaccggttgtgcctgtgccgactcatgcacgtcagtgatgattttcacaccgaaagtttgtttcagttcctgaaaaatcttcattccctcttccagacccgggccgcggtaagagtgaattgatgatcggtttgctttatcaaaggaggctttgaaaacataaggaatgcccaatttttgtgtcactgtcacatagtgctcacaaatactcatggccaaatcccgtgactcaaggacattcataccaccaaagagaacaaacggcagatcattcgcgaccttgatatcaccaatatgaaccactttctgttgcatacttataccttccgttagggaccaataaattaatgagataaatcagtgcagtgcgctattcatcagtgcaaaacaatatttcagtgcaaaacaatatttcagtacaaaacaatatttcagtacaaaacaatattcaatgtaaaacaatatttatttcaatgtaaaacaatgcattgctgctgaatagcatatatctgcattctgaccatttctgccaccgggtcctccgggcagtgctccacaaaataatttaaatcagaaaccgcaatatgattacaatcaagttccgcataaatcagccccctatcacgtatttcataggggttatcgggatcaaatatcagcacagcttcgctcgttctcagtgccaattccatctgcccttcgtccatcaatgcagcttttattgtatccagcactttacgtataatgctggcgttatccgctccttgcaaatcatcggctgttaatttagctgtctgactaatattgcctttaagccacacatcaagcacatattcacttaacgcttcaccattgagtggattaataaacctcgccgtgttatctggataatcaacacgcaaaatcaactgggttggaaaaaccaccggcataaacggtagcgctaaagcctgagcaatatggataagaattacccctaaaacagcagaggaaccttggcgagtttgcagtactttatctagccataatgtatccgacagacaataaacaccaccggcaccgccgaatttccagctttgataaaaaagcctcagtaatttttccaaccgttcttctatagttaactgcggagatatttcacgtctggcttcatcaatcaatgcttgaagctgcatttccactgaatgctgaggaaaatcagaacgcaatgttcgggaaattaacaggataccgctacttaacgatgcattattaaattcataatcagctatggctttcatcacttttccactgaccctgtgttattcgctcattaccgccataatcctgaaaagtagctacctgccgataaccactttcagaaaacaggcttcttataacatttccctgtttccaaccatgttccaataacaaccacccaccaggtaacaaaaaatggcgagatagatcaataatggtattcagatcagcaattccctgttttgccgcaattaatgcactatctggctcaaaccgaacatcgccctgagatagatgtggatcggtttcatctatataaggcggattactgacaatcataccaaactgttgattattcaacgaaaaaaaccaattacttaacaaaaaatccacattttgtattttgagtttttcagcattgccctgcgccagcatcaccgcatcaggattgatatcaaccccggtaacccggcaatcagggcgctcactcgcgattgccaatgcaattgcgccggttcccgttcccaaatccagaatgcggcaaggtgtcagcgatagccgttcaagtgccttttctaccagacattctgtatcaggacgtgggattaacgtagcgggagagacatttaatggcaacgaccagaattcacgctcaccggtgatgtaggcaataggttcacctttcacccggcgagcgagtaaagcctcaagctggctgaactgctctggagccaactgagtttcaccgaatgccaatagataagttcgggaatggtgagtgacaaaccccaacaaaatttctgcatctcgtttaggactgtcacttgccgataactgcattgtggcttgtttaagccaagatagataatccatcaatcctgctctgacaaagccgataatagatcagcctgatactcattcacaatcggctgaacaagcatatccaatttgccttctatcacttcatcaaggcggtacaaagtgaggttaatgcggtgatccgtcacccgcccttgcgggaaattgtaagtacgattgcgatctgaacgatcaccggaacccagcaagttacggcgctcagaagcttccgcttcctgacgtttacgaacctccgcagcgcgaatacgggccgccaataccgacatcgctttcgctttgtttttatgctgtgaacgttcatcctgacattcaacgacaatgccagttggaatatgagtgatacggatggcggaatccgtggtgttgacatgctgtccacccgcacccgatgaacggaacgtatcaatacgcagatcacttggactgatttccggcaactcggcgtccgggatctccggcaaaaccgcaacggtacaagcagaagtgtgaatacgcccctgcgattcggtttccggtacacgttgaacacgatgaccacccgattcaaattttaaatgaccataaacctgctcaccggaaactttcgcaataatttccttatagccaccatgctcaccatcgttagcactgatgacttcaactttccaacgacgggattcagcataacggctgtacatacgaaacaaatccccggcgaaaatcgccgcttcatcaccaccggttcctgcacgcacttcaagaaaacagttacgctcatcatcaggatctttcggcaacagcaacaattgcagttgctgctctaattcttcattgcgaaccttagcgtccctgatctcttcctgtgccatttcccgcatttcagggtcatcaagcattatttcggctgctttaagatcatcctgaaccgcactccaggccttaaaacagttcgtcacatcagtcagttgagcatattcccgcgacaaagcacgaaaacgttcctgatcagcaatcacatcggcatcaccgagatgagccaaaacttcctcgtgacgttcttgcaatgcttccaatttagcaacaatagaaggcttcattcttggtttcagaccctattccgagatatggttaattatgttccagccccaggctgtcacgtaataaattaagacgctccagatcaccattgctggctgcttgctggagtgatttggtaggagcatgtatcaagcggttcatcaattgatgagtcaattgattgattgcctgttctacgtcagctccctgattgatagcagtcagtgccttagccgccatctcagcccgcatctgttctgcctgattacgatactcacggattgaattcactgcactctgcgaacgcaaccaatccataaaataacggctttcctgctgaacaatacattcagcctgaaccgccgctgctttgcgctgcgcaagattctgctgaataattgcctgcaaatcgtcaacactgtagagatagacgttattgagtttttccacatcaggctctatatcacgaggaaccgcaatgtcaacgagcaacatcggttggttacggcgtaactttaatgcacgttcaaccatccctttaccaataataggcagcgggctggccgtcgaactgataacaatatcagcttcagctaaacgtatatcaatttcaggcaaggtgatcacttccgcctgaacttcatcagccaatacctgtgccttctcttttgtcctgttagcaatcatcatatggtgcacacgatgctctctcaaatgacgagccgctagctcaatggtttctccggcacctaccagcaaaatattcagttcagaaagtgattcaaaaatctgccgcgccaaggtacaagcggcaaatgcaacagaaaccgcattcgaaccaatctctgtttccgttctgatgcgcttggcaacagaaaatgatttctgaaatagtcgctccagttcactcgataaagagtggctgtgctgcgactcggcaaatgctttcttcacttgcccaagaatctgaggttccccaagtaccaacgaatccagcccactcgccactctcatcaagtggctaacggcttcattatcacaatgccagtaaatactggattttagctctctgggattcagttgatggtattcacacaaccagccaattaactgctcatacagattatcttgctgttctacgctgagataaagctccgtacgattacacgttgacaacacaaccccccctttcaccaagggatgctggaggaggttatcaagcgcttcaccaatcgtatctggagaaaaagtcacccgttcacgcaaggatacaggggccgttttatggttaataccaagtgctaacaaagtcatatcaacttcattgagttatcagcagagagatcgttcatcgtaaaaaacattctatacccgttatctttcaagttgcttctttgttggctgcactcactcaacccggtcacatcgttatctatgctcccggggattcgctcccttgccgccgcgatccatcttgaaatccatagggtataatattgatgaaatcatcacccttaataaggactcttataagctgtgcattctacttgatacctcagctcaataaaagacaatcagcagtgtctgatatcattattcagaacatttttttgaaatttaactggattaatagttcattcttcattattaagtgatgtaaaagttttcacgttattaaacagagattaccgatgaagccaatacaaaaattatcactattccgcctattgccactctcttgtgtactactgttgaccgcctgtacattaacacaacctggcggaacaggttcggcggattctcctcaatggcgagcacatacccaacagctacagcaattaaatcaatatcaaacacgtggatcttttgcctatctgtctaatgagaaaaaagtttatgcccgctttttctggcaacaatatcatcctgaacgctaccgtttattactgactaacccactgggcagcacggaattagaactgatcgttcagccaaacatgacgcaattaaccgatagtcaaggtaaaaaatattttagtgataaccccgaagagataatttatcagttcaccaatatggatattccattagataatctgcggcattggataacgggtctccccggtgatgccaaaaactttaaactggatgctaactatctattgaaaaccgtcaattaccagcaaaatggcgcaacatggcaggttaactatcaatcctacgatacctcaaccacccccgcccttcccaaccgtctggaactgattcagggtgatcgccgcattaaactgaaaatggataactggaccacaaaataatgacattcacttggccctcaccggcaaaactgaacctatttctctatatcaccggtcgtcgcgctgacggttaccaccagttacaaacgctatttcaatttcttaattatggtgatgaaattacgattacccctcgtcaggataatgaaattcgtttactgacacccgtggagggagtggaacacgataacaacctgattgttcgcgcagcacgtctcctgcaatcctatagcgacaaacaccatgcgggtattgctcataaaggtgctgatattcatatcaacaaacgtctgccaatgggcggtgggttaggcggaggttcatccaatgccgctaccgtactcatagccctgaattatcactggcaaaccggtttcacagacgaaacactggccgccctcggcgtaagtcttggtgctgatgtgcccatctttgtcaaagggcatgccgcattcgcagaaggtattggtgaaatcctgcacatagccgagccggaagaaaaatggtatctggttgcgcatcctggtattgaaatctcaactctgcgtgtcttcacagatccagaattaaaacgtgatacaccaattcgccctctggccgcattattaaaggctccgtacctaaatgattgtgaatctcttgtaagaaaacgtttccgtaaggttgaacagcttctttcatggctgctagaatacgcgccgtcacgcctgaccggaaccggtgcatgtgtattcggtgaatttgaatcagaagcatcggcccgtaaggtgttaaatcaagcccctgagtggttgcagggttttgttgcgcgtggcgttaacaattcacctttgcacaatttccgctctgggatacccgtgttattgagccaatgaataaatatgttatttaacattggtcaacaatatctctctggacgcaagcctgaggtctttctcgtgcccgatatgaagctttttgctggtaacgctatcccggaactagcacaacgtgttgccaaccgcctgtacactaatcttggagatgctgctgtcggccgtttcagcgacggtgaagtcagcgtgcaagttaacgaaaatgtgcgtggtggtgatattttcatcatccagtccacttgtgcaccgactaacgacaacctgatggaattagtcgttatggtggatgcactgcgtcgtgcttccgcaggacgtattaccgcagtaatcccttatttcggttatgcccgtcaggaccgtcgagtccgttccgcccgtgtgccaattaccgccaaagttgttgcagacttcctgtccagtgtcggtgtagaccgcgtactgactgttgatctgcatgctgaacagatccaaggtttctttgatgttccggttgataacgtatttggcagtccaattctgctggaagatatgctacagaaagagttagaaaaccctatcgttgtttccccggatattggcggggttgtccgcgcacgtgctattgctaaactgctgaatgataccgatatggccattatcgataaacgccgcccacgcgctaacgtttctcaagtgatgcatattatcggtgatgttgctggccgcgactgcgtgctggtcgatgacatgatcgataccggaggcaccttatgcaaagcggctgaagcattgaaagaacgcggagcaaaacgtgtatttgcctatgctactcacccgattttctccggcaatgcggtggataacattaaaaactcggtgattgatgaagtggttgtttgtgacaccatcccattgtctgctgagatcaaagcgctcaataaagttcgtactctcactttgtccggtatgttagctgaagcgatccggcgtatcagtaatgaagagtcaatttctgcgatgtttgagcactaataaataagttgtactcatatatgaaaaaacccgttgtacaagagcttcaacgggttttctgcttactctggaagaataatacttctccatttttgttatggataccgatgactaccacgacgataacgctcatcatagtttcttagccaccaataacgatctgccacaccttcccggcctcccacaccggcaccagccaaccaaacaagcgcaccaataaaaacgcccaatagcgctgcttcagataaaaactcaggccagccaaaaccgaagatgtgaggcagtaatgtataaaccaggctactcactatggtgaacataccgacacccatcaatacattaccgactatgaaggcactttgacgtttcatatgttacctccaacattcttcattaatacacactcttcgttaatacacactttccgttaatacacactctccgtgaacactaagaaccgaaaattcaacagctaacgttaattgactctatataactttatagcctatttatagtatagccctatttcataaaaggtcattgcggacacgatcacaactaaaggagatttaataacaattccctcatcattgtgagaaataacatgaagaaataatgagttagtaacctgaactttgcttaaagagaagttcaggtttttaactaaatattgatatataacaatgatagttgtgaaatcccacccaggttatatattcttaatcaatgattcctaccgggataataaaaatcatcttattttcacactgcatgataacggctaaaaacaggggatttgtctaattttttaatgagtaaccatcaatcagcatccccaaatatccaacacctaatatagccctggggttaattctatccacgcttgagaatataccctcccatcaatacaacttatatacaccgatgaaaattcactcatgggaggtacatgattatgaggcgaatacccccgagaataagaagaagaaactctaaagctaaaatagccatttttatcggtagtcatatgcttgtcttgatcactcaatgacagataagatcccatagatactcctatagtgacattaggttcacctacgccattcttatataaatatccagctataataccgcttgaaaatgaatacagcacagccggaaattctataatctttaactgatatggattatacgtgaaacacatagctatagccttttcaatagctcccgcttgtgccattagtatcacttcaccagcacgactagattgtattgacgccgttatcttaccatctttatctgtcatccccgacgacggaactactgttgctccactatctgcatagaaggttatttcttggtttttaattccattacccaaccgatcatacaccgttgcaactaccttattctcatcggcacccttagtccatgcattatttttttctaagtcaagattaagcactgccaccgattgaggagcaacagtaaactcgacctggagaggaggggcttctatttcagtatcatcttccaagcaagcatacacattcccttgacacggagttgaatcagtagagattatttcaactgataccttacccagtactcctgtaccttttataattttacgatcattattctctttaaataccatagattgattatctaacgtgaaaattatattcaccccatgcaataaataaccatcctggattgcgcttacaccgatatctatcggtttatccgcagtttccgttttttcacttgatagccaatttaatgttttagcctcttttggtgcttgttcgtcattcatttcattctcctaatttatcactatcatgtatatttatatatgtcatcatcgatttaaagttaaaaaaataatttcaagttgataacattatactaattaacaatattccttacgctaaacaaaaggaaagtgtttaaaattaatagaaaattgaatcgacttatcagtatcgggtaaacttattatcacattatttttttctgctttggtattagttatatggaaagttgtacaaccatctttactaatcgcaacctgcaactctctttcattatcaccataacctgaaattatcgcggagccatcagtacgaacaagtaatcttttaccggaatagacagtacggtccacaataacataaccactacaaacactcacgccatcagcaggtacttcagaggtaaatgcataagcactgataatatttcctccatctctccactcactaaatactgcctgacttacacccggtgttatagaaccatcctccgccgaaacagtacaacgaaaactacccgctacctcagattgcaaatggaaataagccagcccgaaactattaggggaaaactgatattttgcaccacccccttcaacaatactgcctgattcaacactggccgataatctctttcctggcggcccataaaccacagctaaatttttcgggtttattctgggatattcattagataccatcggcgcaccttcactaattgatatcatggcagatgacatatccgttagcgacaatatcactgaacctggagcagaactattattaccaacctcataataccctgttcccacgccctcttgacccaaacaaagcacattttccgccggcaccactaaagaaacataaccctgcttaacatcctcatcactgactgttattggttgtgcatcccaggccgccctcgcaatcggatcatagtcaaaattatgcccttgccagtggaatatgacgctatcgcctttctgcatctgctgataactaatatgcacatttaacccactatgttgtacaagagatgaatagtgaatcacgccagatgttgaatctggataaatggatggtaataattttatcgatggggaattaataattttaataacagccggtttagagaaattttcattctcgaaatcatcggctgatgtataagtcacattatagcaaccatccggtatttcagagaacggaatagttacagtaaaaaaatcaagattaatattctgaatataatagggccgagaaaatatccccccaacatttaccacgatcatatccccgattcttagccactcatgataaggtactttgataattaaatcttggttctgttgaacagaaacatcaatcaggccatcgtgttctgcttgcggcaattctggcgacgataaagaaataggtgtattgtcgttattggtaatcatatttcacctcccattggagtcggtctgaacgataaaacaaaattgactttatcgcctgaatctgaatcaggcgctgttagccaaacattaactttacctactgtgttgctaatcacattcactgtcgcactaccatcctcctttaatggaatatctgcccaatctttattataaccatcgatgagggcattattattcactcttatccggatttgattaatatcatcattatgttcacgatcaatgaaaagatatatcgagcaaggcgtcttgccatctgccggagcgcctgtagtataattataggcggtaaatattatagcctcatcagactgacgataattaccaaaagtaagcggaaaagacattactttattgatatcctcttgcggggcaatcaccacaaaagccgaaaattcttcgctatttttaatatttttatgttcaaacggagaacgaacataaaaatgtccttttccagtctcatctaacgtcaatatgatctgatctagattaatgttatcgtctacaatgaaagcaccgatagatgtcgtagcatagaatttatgcccaggcaaaccatatagagtcacaatattttgagggttaagattagggtaatcggttaaatcactcatcgccgcgttttctgtgataatcacacttgatatgccgttattcatattgtcaccattaactccatgatttattaatcgaaaataaaataataacgcttaataaaatattaaatctcaatcagttaaatttatcgtccggggggaaccgtatcaatgcgtccataccaaatcttagagtgctttgtactttcactacactccatgcctacactataagtgatataaacccagcctggcgtaccatcacgatatgaatttacattagtaaaaatcgcccgaccaagtggaataatagcttctccagcgtccattacgtcggcagttaccgtatgaggtgcaagagaataaatctttgaaaatggattctcattgataataccattaacgtaaatacgtacattaatgacattatttatctctatcccattcttttcacccacagcaatatgagcatccaaccctcctcctaaaatacttgcaagattaatcttgcttgactgtctaaattctacctgatctttatgactgaaaattctgggtaccgctaatatacgcctaatctctggtggtacatttagtactggcttcgttaaattaaaatagcgggcagatgatacagcgacgtttccagttgcatcagccacataataatacaactcattattgccagtatttggaatattggcatatggaactgaaataaatgacatatccaactgattcagatcagtaatgacagcagacgcaccttgcgtttcgtcatcatcttctctaattattaaaaaaactctatccctcggcctaacaccttcataaaatggaataatcacatgaaaatctgtattgctatttcctactgatggcattaatttattaccattcagttctgcaatatctggcgctggaagcgttggctcaatatcttcggtaatcatcaaaatgtttgatgaagcgctttttaaaagatatggcagttttgtcaacatattcactgaatagttaccctcagatttcttagggaaaactattaaggcaataaatcctttactatctgtattaatataatattgacaattatctttttcactaataaacggcaatatttcttccctaatttgccctctattataaccaaaaatacgcactggcttatccgttaccagaggaatttgaaaataaggaagtggatcattttttttattcaaagcataaatattaataagcagtctgtcattaaatagtgaaggtcgccaattatcttctgccggagaaaaatcttttacccacgaatcgccaataattataggggtaaacccttcgtatgaaaaatcatttttaccaatagaatgaaactcaatctctaatttagcatcaggatcggtagctttatccattgaaaacattatggtgaaatcactggcatcagaataagcagaaacaacaaattttgcagtgtagatattattcttgacatcccttgaaatacgcggaatctcatcaaaactgacatcttgctggtcactgtacactatatcagtcgcttccgttactttatgaacctcatcacctgaataagtcacagtgataacaactggacacccttctaaaatcgttattcctgaaacgatatctgctgtaagtgtagacatattcaatctcatattaaagttaaacatcaataagtaaaaaacatctaattttctatcaaaattaatacacttccacaatgatgccgactacctattacctcctttctacttctcaacaaataaattatttactttagccggtcatgtaataacaataaatccatcactcagagcataagctttatatccaagcagacaacataaccataatttttatatgattaagacaatggtaatcgttaaatcacttttcaccatgtttgctattattcatactgtcaccattaactccatgattcattggttgaaaataacccacaataaaaaatcgctagtttacaaataagaaacatgtccggggaaatggaaaacgcttacgcattttccataaacgggtaaaatctcaatcagttaaatttattgtccggggggaaccgtatcaatgcgtccaaaccaaatcttggagttctttatatttacactataagtgacataaactaatcctggtccatcatcatacgagtccacaccggtaaaaggtgcctgaccaagcagaataatagcctctcctgccgccacttcttcggcagttaccgtatgaggttcaagagaataaatttttgaagatgggctatgattgacaataccattaacgtaaatacgtacattgataatactatccacatctattccattttttttacccacagcaatacgcgcatccagccctccccctaaaatttttacaagattgatcttacctcgctgtttaagttcgctctgatctttatgagtaaaaattctagctgccgctaatgtacgcctaatctctggcggttgattcggtactgacttcgttaaataaaaatagagggaagatgatatagctacgtttcccattgtatcagccacataatagtataactcattatcgccaatatttggaatactggcatatggagctgaaataaacggactatccaactgattcagatcagtaatgacagtagatgtactttgtatttcatcattatcttccctgatcattaagaagattctatctttcggtttagcaccttcataaaatgggatactcacatgaaaacccgtgctactatttcccactgatggtattaatctatcgccatctaactctttaatatctggcatcacaagggttggagcaatatcttctgtaataaacagaatatttgacgaagatttccttgaaaaaccctgcaactctgtaaacatattgactgtatagttacccccctctcccttgctagggaaagctcttaaggcagcaaaaccttcactattcgtattaatatagtatttactattattgagttcttgaataaaaggaaatatttcttccgtaagttgtccttcctcataaccaaaaatacgtaccatcctatcagttaccaagggaatttgaaaataaggcaacggatcatctgttttattcagcgcatagatattaacaatgaggctgccgttaaactcagaaggttgctcatcatccgctaccggagataagtcttttaccaacgaatcgccaataatcataggttcaaacgctgcatgtgaaaaaccatttttatcaataggatgaaatgctatctctaatttagcatcggggtccgtagtcttatccattgaaaatattatggtgaaatcattggcgacagaatgagcagtaacaacaaattttgcagtgcagatattattcttgacatcccttgaaatacgaggggtttcatcaaaactgacatctttctggtcactgtacactatatccgtcgtttccgttactttatgagactcatcacctgaataagtcaccgtaataacaaccgggcactcttctaaaaccgttattcctgaaacgatatctgctgtaagtatcgacatattaaacctcatattaaagttaaacatcaataagtaacaaacgtctaatcttcttaccaaaataatgcgtttacaccacgatgcttactgtctattacctccttcctgtttgttacaaaaataaattatttacttcatccgttattttttggtcaagattaggataactgtaaaattacttctcaccctgtttgccattattcatactatcatcattagtgccatgattccttggtttaaaataaaaggacaacactcaattaaatattgtatctcggtaatgaaaaaatcgccaattcacaaaataagcaacatgtccgggaaaatggaaaatgcttatgcattttccataaacaggtaaaagctcaatcagttaaatttattatcctactggagcagtattaatgtgcccactccaaatctcagactccttcgtgtctacactataagtgatataaactgagcctggtgtaccatcacaatacgaacctaccttagtaaaaggagcctggccaagctgaataatagtttctccagcagccacttcatcggcagttaccgtatgaggatcaagagaataaagtcgtgaggatgggttatcatttacaataccattaacgtaaatacgtacattaataacactatccacatctattccattgttttgacccacagcaatatgggcattcaaccctcctcctaaaatattttcaagattgatcctacctgactgttcaaattctaactgctgtttatgagcaaagattctgggtactgctaatgtccgcttaacttctggtggttcattcggtactgaccctgttaaattaaaatagagagcagaagacatagctacatttcccactacatcagccacataataacataattcattgtcgccaatatttggaacgctggcatatggaactaaaataaatggattattcaactgatacagatcagtaatgacagtagacgcacctagcgtttcgtcattatcttctctaattactaaaaaaatcctatctctcggtttagcacctttataaaatgggatactcacatgaaaccccgtgctactatttcctactgatggcgttaatctatttccatccagctcttcaatgtctggcgcaggaagcgctggagcagtgtcttctataatgaaaagaatatttgatgaagcgttctttaaaaaacccggcaattctatgaacatatcaacggtataattaccaatcttctccttacgagggaaaacccttaaagcaacaaaacctttatcatccgtattaatatagtatttattattattgatttctttaataaaaggcaatatttcttccgtaatgttttctccatcatacccaaaaatacgtactaaattatcaattaccagagggatttgaaaatagggtaacggctcatttgttttactcaacgcatagatattaataagcaagctgccattaaattcagaaggtcgttcatcatcagctaccggagataagtcttttatcaacgaatcgccaataatgataggttcaaacgctgcatgtgaaaaatcatttttatcaatagaatgaaatgcaatccccaattcagcatcggggtccgtagccttatccattgaaaatgttatgatgaaatcaccagcgtcagaaccagcagtaacaacaaattttgcagtacaggtattattctcgacatctcttaaaatacgaggggtcttatcaaaacgggtattttttgggtgactgtacattatgtcagtcgtttccgttactttatgtgtatcatcacctgaataagtcacagtaatgacaaccgggcacgcttctaaaaccgttattcctgaaacgatatctgttgtaagtattgacatattaaacctcatattaaagttaaacgcctatacccgttatctttcaagttgcttctttgttggctgctctcgctcaccccggtcacatagtttgctatgctcccggggattcactcccttgccgccacgatgcatcctgaaatccatagggtatataagtaacaaacacttaattttctgtcaaaataatgcgtttatacaacgatacttactatttattatcctattacctccttcctgtttgttacacaaataagtattcattttagctattaatgtaatagcaataaacccactactcataacataagctttatatccaagtatatactatatagtcacaatatatctggggctaaaactacgataattgttaaatcacttttcgccatattgaccattattcatactgccaccattaactccgtgattcattggttgaaagtaaaatgacaacgcttaataaaatattatagcttggtaatgaagaatcgccagttcatcaataagaaatatgttcagaaaagtggaaaatgcgtgagcattttccaacaaacagataaaagctcaatcagttaaatttattacctaggtggaacagtatcaatatgtccaaaccaaatcttagattcgtttttgcctacgctgtaagtgatataaaccaagcctggcgtaccatcatcatatgaatctatattagtaaaaaacgcctgaccaagtggaataatagtctctcctgccgccacttcgtcggcagttaccgtatgaggatcaatagaataaattttcgaagatggattatcattgataataccattaacgtaaatacgtacattaatgacatgatttacctctattccactgtttttacccacagcaatatgggcatccaaccctccacctaaaatatacttaaaactaatcttacctggccaactaaattccttctgtcgtttatgattaaagattctaggtctcgctaatatacgcttaatctctggtggtatatttggtgttgatctcgttaaattaaaatagagggcagatgacatagttatgtttcctattacatcagctacgtaatagtataacccattattgccaatatttggaatactggcatatggaactaaaatagatggtatatccaactgactcagatcagtaatgacagtggacgcacttggcgtttcatcattatcttctctgatcattaagaaaattctatctctcggtttaacaccttcatagaacgggatactcacatgaaaacctgtattgctatatcctgttgatggcgttaatctatcaccgtccagctcttctatatctggcatcaccagcgctggagcaatgtcttctgtaataaacagaatatttgatgaagatttccttgaaaaaccctgcaattcagtgaacatattaactgcatagttcccatcttcctcctgactgggaaaaatctttaaggcaacaaaacctttatcatctgtattaatatagtatttattattattcagttcttgaataaaaggaaatatttcttccgtaattttttccctatcatacctaaaaatacgtactaatttatccgttaccaggggaatttgaaaatagggtaatggatcatttgttttactcagcgcatatagattaacgaggaggttaccattaaaatcagaaggctcctcattatctgctgccggagataaatcttttatcagcgaatcaccaataatgataggttcaaatgctgcatgtgaaaaaccatttttatcaatagaatgaaatgcaatttctaatttagcatcggggtccgtagccctatccactgaaaattctatggtaaaatcaccagtgccagaattagcagtaacaacaaatttcgcagtgcaggtatttttctcaacatctcttgaaatacgaggaattttatcaaaataggtatttttgggggtactgtgcactatgccagtcgtttccgttactttatgagcatcatcacctgaataagtcactgtgataacaacttggcacgcttctaaaaccgttattcctgaaactatatctgctgtaagtgtcgacatattaaacctcatattaaagttaaacaccaatcagtaacaaacacttaattttctatcaaaataatgcgtttatacaacgatgtttactctctattacctccttcctgtttgtcacacaaataaattattcactttagccattactgtaatagcaatgtattctttatccaaaagatatcgtaaaataggatacgatgcttcctcctcacattcaaaaaactaagtcagaaaccatcagcatatgagtccacatatgaaaaaagcgactgaccaagctgaataacacttattctaacctccgtatcttccttgattcatgtatgaggatcaatagtaataaatacttaatctaactcctctcccataataccatcagcgtaaacacttacatcaataacatcatctacattgatttcaacttccagccctacaacataagcatccaagtcccttccctgaataatcaaataattgattttccctcgctgttcaagttctaaataaccttggtgagtaaaaattccagctacagctaatgcacgagaaacccctgtgatcgttcattagagactggctcgattaaaataacgagaagatagcatggctacattttcactataagtagcagtaatgacaactgagcactcttctaaaatcgtcattcctgaaattatatctgctgtaagtgttaacatattaaacttcatattaaaattaaacaccaaccagtaacaaacacctaattttctatcaaaatagtgcgcttcaacaataatgctcactacctattatttccttcctactcttcacataaaaccacataaaaaattgcatttggatctttctccttcaacaaatgaacctgaatactttcgtcatttatttgtagccctcccattgttattccgttagaatttaacgaagctcgtggatctcctaataaacccttatcaataagattcaaattcaaatccttaaccaaataatcaattgaaccaccaagatcactctcctttatcctatttcctcttgtacaactaggtaaaggcttactcgtgtcaatacgatccttcgagtaagcggaaccaatccccggccctgtcgagctagaatcaacaattacaaagtgatcaattttcacatcgggaataatatattttaaataccggccagattctgggtgtgtaaacgtcgtagttaatgtagccgttcctgcttttttaacttgaaaataatgtccatccacatcaactacgttcctattacttgagtcatatactccagtataaccagctatagttaattctccaggcaaatactcgggttcaaacctcatttttggccaagcaaaattcattctttcttttggaaccgaacgcccgggtccttttccatctttagtgtcataatccattataaagaagtcagtaacatcctgctcattagccttaatttctaccgttttattcttagaaccaacagatgaatcattcactttggccgttaccataacagcaacaaacccgccacttttactatatacctgatattgcgctttcccatcagcatctgttttaccatcacccactacctgagttaccaagtttttatcagtaatggtgactcccttactatttgctgcactccaggccaccgtaataccgcttttcgcctgcccggaaaaatcttttactgtggcagtgaaggtataagtatgcccctcgccttctccttctgttacgtgatctgggctaacagtaagagaagcaagctcatcagggctgataaaactgacttttttatctacattcaccggcgtctgctgagtagctgtttttgcggacacttgtacatcaatcgctaccactgtactggttaaggtcgcggtcacctgtccctgcgcattactcactgagttgttctgtttcgtcagttttaacccgtcagcctttggatctgtctgccagtcaatgtcgaccggttgacccaccaccagattgccgtgcccatccttcactgtcgccgtgaagatataactgtcagtaccgttgttgtagtgcttctcgtctttatccacttccaccgtcacgctggcgacataatagctggcgctgaactccgtaaaactgactttgccgttcgcattctccgccgtcttctggctggctgttttcgccgatacctgcacattctccaccgccgctgtactggttaaggtcgccgtcacctgtccctgcgcgttactcactgagttgttctgtttcgtcagctttaacccctcaaccgttggctctgtctgccagtcaatgtcgatcggtttatccgctaccggcttgccatgcccatccaccaccgtcgccgtgaaggtataactgtcagtgccgttgttgtagtgcgccttatctttatccacttccaccgtcacgccggtgacttgataactgagactcagctcctcaaagctcacctttcgatcagcatcgacccatgacgggttcgccgccgccttcgccgatacctgcacatccttcaccgccgccgtgctggttaagatcgccgtcacctgtccctgcgcgttactcaccggattgctttgtttcgtcagggttaacccatcagccttcgggtttgtctgccagtcaatgtcgattggcttatccgctaccggcttgccatgcgcatccactaccgtcgccgtgaaggtataactgtcagtaccgttgttatagcgcttctcgtctttatccacttccaccgtcacgccggtgacttgatagctgaggctcagctcctcaaagctcacctttcgatcagcctcgacccatgacgggttcgccaccgccttcgccgatacctgcacatccttcaccgccgccgtgctgattaaggtcgcggtcacctgtccctgcgcgttactcaccgagttgttctgtttcgtcagttttagcccgtcagcctttggatctgtctgccagtcaatgttgaccggttgacccaccaccagattgccgtgcccgtccttcactgtcgccgtgaaggtataactgtcactgccgttgttgtagtgcgccttgtctttatccacttccaccgtcacgctggcgacataatagctggtgctgaactccgtaaaactgactttgccgttcgcgttcaccgccgtctgctggctggctgttttcgccgatacctgcacattctccaccgccactgtactggttaaggtcgcggtcacctgcccctgcgcgttactcaccgaattgctctgtttcgtcagttttaacccgtcagcctttggatttgtctgccagtcaatgttgaccggttgacccaccaccagattgccgtgcccgtccttcactgtcgctgtgaaggtataactgtcactgccgttgttgtagtgcgccttgtctttatccacttccaccgtcacgctggcgacataatagctggtgctgaactccgtaaaactgactttgccgttcgcgttcaccgccgtctgctggctggctgttttcgccgatacctgcacattctccaccgccgccgtgctggttaaggtcgcagtcacctgtccctgcgcgttactcaccgagttgttctgtttcgtcagttttagtccgtcagcctttggatctgtctgccagtcaatgttgaccggttgacccatcaccagattgccgtgcccgtcctttactgtcgccgtgaaggtataactgtcactgccgttgttgtagcgtactttgtctttatccacttccatcgtcacgctggcgacataatagctggtgctgaactccgtaaaactgactttgccgttcgcgttcaccgccgtctgctggctggctgttttcgccgatacctgcacattctccaccgccgccgtgctggttaaggtcgcagtcacctgtccctgcgcgttactcaccgagttgttctgtttcgtcagttttagtccgtcaacctttgagtctgtctgccagtcaatgtcgattagtttatccgccaccggcttgccatgcccatctaccaccgtcgccgtgaaggtataactgtcagcaccgttgttgtagcgcttcttgtctttatccacacccaccgtcacgccggtgactcgatagctgctgctggactccgtaaaactgacttttttatccgtagtaacacgttcgccattaatcctgacgctaacttgtatatcggataatggcgttgtactggttaatgttgcagtctgttgtccatttttatctgttgcttctgaatcaggctttaatttcaatccaggatcttttttatccgtatcccaaatcaatttggcattttctatcggcgtttttttgtcagcgccaagcagggtagctgtatagacatatttcgcatttccatcagcaattaaaggatcggttgtattaacactcaaagagatattacgttgtaatacatgagcttgtatttgcaccctcagctgatcatctttacttgtacctgttatagtatagtcattttttccatcaggctgatattccggtaactgaatggtataaccatgagtactttctatatttatcatcccgccattcttctggaataattcaggtatatcccaagtcacatttttgaatggagtatcagattgaatttgtattggtttaacttcaccaccgtaactactaatttctattacagggaccagtaacctaaaatgttgctgttttttcagataattcaaaataatattattatttctttcaactaagtcgtaacgactgccggccaagcttcgtagtgaagagacattttctggtgaaagttgttctgacaacggaacaccaaatcggtaattcacattgaatgaaaatataccatcactttttccctcttttcctaatttatagtcaatccctgctgtgatcagtggaattggggtataatttaccccaatagttgccgcatagggatctttttgtctcttgttctttccgaataatgcaacattatcaccaaaatattgttcatattttattttggcaccgagtgacggcattgaaggtaaatacatgtcggcaataaggtcataaccattggcagggcgctcataataattgactaaatcacgggcgttatgccaatcactcaggcgaaaataggcgttagcagacatctttaggtagttagtccatagttcaccacccaagctgaatcggctattattaccagttaaatcattatcgtaaaaagtgttcgccccatacatccagttatttatgaataaacgggtgccaatgcctaaattcacagtgtcacggctatctttatgacgatagccatattgactataaacaagccaatgatctttatcatcataaaaaggaacgagtaagtctacagaactttcatccagtcgcccacgatgatcaacatttaaattaattttagctgtaccaaactgtgataaccacttctgggtattacttgttatctgactgtttaatttattaacaatataatcctgtgccaattttttcggatctgaatttaataatccaaggattttagtgccatgagataaaattaaaggagggagggggtgattaccgtctttatgactatcttcgtctaaccacagtatttttggtttttcaccgctatcgttttttcctactacgcttctctttgataaaaaattaccacatctcctcggctctgatcgctttttctctttataagtaacgttttcgtgtaacttattgctagcctgctcggttatctgttttttgctatcaatattatgctctataactgcctctgggtattcctggcaattttcaataccaatcaaagactttactggttcagataaagcaggataactttttagtagcataagcgctgcaaataaaaaacagacgattagcacacctttatttatcttacaatttattacattacgagaattacgattgatgctcatcagaaattacctaaagttattgctgttatacccgtcatctttcaagttgcctctttgttggctgcactcgctcaccccggtcacatcgttatctatgctcccggggattcgttcccttgccgtcgcgaagcatcttgaaatccattgggtatatattcagttatagctaatgagtacaataaattactttttatgactttgtataatgaaaataaattatcagtcgataacaataagtaatcacttagcaaaataaaaatcgtcgtaaatcatttactaacacggcattaaatatttatacaactttcattaaaaacaaactttcattaaaaacataagcagaaaacccgctccaacgggttttctgtctatttatcattattgagtttacactcagtgattatggttattatgatttttccggcagttgaactcgaacattaatcactcgtccatcggggatatcacagagttcaccatcattataataaatgacttctccatcactattaacgctcttaacacgtttattttgagcaaatatcggcgcatctttattttgacgatgataacattcgatggttatattgccattagatggatctactgattcacaaacccaaatcaaatttaatccgttgctatctgccgggacaattgtaccaccgtgaattccccatgctccatctttagcgaaaccgttgcagccgctgatgcgatatttccctgtctcgatccgctcgacagtcataccttccgcttcgcgagttaattcataagtgccgtctggatgaatactcactacagggctggatattttaagattgccgttagtatcagcaatacagttatcattaaaaacagcaataggattaccgttatatttcaacttttcgccaactgtcagcctgccataatttttttcgttgcaaatatcaaaatccgatgagccgtcacctggaactccaatgtaggcagttctttttcctccctcaacaaactgaaaatatgcgtgtctacccgtgtcatatattatattaaaaatacccccggccccctttaaatttgccgacccggcatcaatctgccccgcaggagaaacagagaaaacccgattattattaatatatgccgccaactctcgaccaatggttaatttgctagattttttttcgttacaaatatcaaaatccggtgagccgtcactcgggaatccaacataggccgtcctttttgcttcctcaataaactgaaaatatgcatgtttacccgtatcatgggttatgttaaaaacccccgcatttccccttatattcgctgacgcggcttccatcagacccgcaggagaaacagagaaaacccgtttgtcattaatatctatcgcatatccgtaggtattagcactaccaccacgcacaataccggctttagcataattgtcataccaattgtaaagcgtatacgagactattgtacccgtcgatcttaaaccagattcagaaactaacatcgtcgcattacgttcggtgggcagtgtttcaacctgtttaaacctagcgttcccatttatattcgctgacgcggcttcaatcaaaccctcaggagaaacagaaaaaacccgtttgtcattaatatctatcgcatatccgtaggtattaacattaccaccacgcacaatacctgttttaatataattgtcataccagttgtaatgcgtaaacccgactagcccattttgcggtctggctccctgcaaagaaactaacatcgtcgcattacgttcggtgggcagtgtttcaacctgtttaaacctaaaatactgtggataattcccgccattggccgataccgcatttttcgccaattccactgtttccgataagccgaggtttttcacaaacccgctcttatcaggaatatctgcgccattttgattttttgccaatcggttattcgcattatcatttacatcagaaaccagtttctgcgttaccgcgagggtattactattacctattgtatctgtgagctggataacacctttttgtgttaatgaagcacttggtactgctattccgattttttgttctaatgctctatttaattggacaataagtttggctatatccccatcatccagaacatcattaccggaatatgttgcgataaaactagccacaacagatgttatggttgacgactgacgtaacgccttgtttagtaaatgaatcgtaatatgatctggtggaaatcccgtttttaaactctggctttcttcatatccttcttgactcaccacattagcattattactaatagaaaaagctttaaaatcatttttttgattcatatatactcctaaaattaaaaaaacatcatttcataatcaacatgttaaattcctgtaaaaataattcccctcaatttattttaattatagtttagcttagaaaaataataattgagccaatattacaacttaaattaccaactattttttataattgatagcaatgaaaaaccaaatgtcattaagccagatctatatcaaaaatatttccatccatttcctcacttgctattacaattgcaaaacttattaaattattttttacaattttacataatgaaagtcacttaacgatcgggaatcactgacaaggaagactcaatcaaactgaactttgtactcgtcgtacccggcaggtaaactatcctcctttttgttttactgccaaaagtgaagaaaaatagtgagtaacataaaattaatcgtcggtctggctaatcccggtgctgaatatgctcaaaccagacacaatgccggagcctggtatgttgatctactcgctcggagccacaatcaatcactgaaagaagagagtaaatttttcggttataccgcccggattaatatctgcggtcacgatgttcgtctgttagtcccgacgacgtttatgaatctcagtggtaaatctgtcgtagccctcgcctccttctaccgtattcaaccggatgaaattctggtggctcatgatgaactcgatttaccgcccggggtggcaaaaatgaagctgggtggtagtcatggcggtcataatggcttgaaagatattcagaacaaatttggcaataaccctaacttttatcgcttacgtattggtatcggccatcccggcgataaaaataaagtggttggctttgtgctaggcaaaccaccagccagtgaacaacagttgattgatgatgccattgatgaagcacggcgttgtactgatatcctgatgaaacaagatatggataaagcgatcaaccgtttacatagctttaaagccagcgtttgatgacatggaatctggaatcgataaatcttgtctgtaagatcgtgataacccgtcattccgtgtataatggcgccaatttttttgactcatcgaaaaggctgatacagccttttgatttataagtaaattaaggtgaaaatcatgggattcaaatgcggtatcgttggcctgcctaacgtcggaaaatcaaccttattcaatgcgctgactaaagccggtatcgaagcagcaaacttcccgttctgcaccattgaacctaataccggtgtcgtccctatgccagatccacggcttgaacaactggctgaaattgtgaaacctcagcgaatcttaccgaccacaatggaattcgtcgatattgcgggtctggtgaaaggtgcatcaaaaggtgaaggcttgggcaaccagtttttaactaacattcgtgaaacagaagctatcggccatgttgtgcgctgctttgtcaatgacaatatcattcacgtttccggtcaagttgatcctgctgctgatattgagatcatcaataccgaactggccctttccgatctggacacctgcgaacgggccattcatcgtgtgcagaaaaaagccaaaggtggcgataaagaggccaaagcagaattggcagctctggaaaaatgtctgcctcatctggaacaagcgggtatgttgcgggcgttggatctcagtaccgaagagaaagcggctatccgctatttgagtttcctgacgctgaaacccaccatgtatatcgctaacgtcaacgaagagggtttcgaaaacaaccctcatctggatgcggttcgtgcgatcgcagaaaaagagggttcagtggtcgtaccggtttgtgcggcggtagaagcggatatcgcggagctggaagatgatgaacgcgaagaatttatggctgaacttgggctggaagaacccggtttaaatcgcgttatccgcgctggctatcagttactgaatctgcaaacttacttcaccgccggcgtgaaagaggttcgggcatggaccatcccagttggcgcaaccgcaccacaagcagccggtaagatccatactgattttgaaaaaggttttatccgcgcacaaaccatcccttttgaagatttcattacttacaaaggcgagcaaggggccaaagaggccggcaagatgcgttcagaaggtaaagactatatcgttaaagatggcgatgtaatgaatttcttgtttaatgtctaatttatttttcatctctgacaacatcacaagatctctctgagactgattaaaattcttaaaatccacgcagttgcgtggatttttgttttcatgatgtctcaaaaaatatcgtaacagctcgggctaaatgcgtctgttacgggcaacgaattacaggttcaactgagcctgtattttttctatctcctttatccactgctgctgaagatgtggcttttggtgagcaatcttacgtttcctatcgatttccagtttttcttcaagataaaacaggcgctccagtaattgctcttccagcaataaggatggttgtaacctgtcatcagcaatgtgggaagcatagcggccatactctttgtgtttactttgctgctgactcatctgttcaatttgctgataaatagcctcaacatcgtgatactcttccaactggttgttattgataaaccaaaaacgctgacagctattttcgatcaaccagcgatcatggctaacaacaagtaatgcaccactaaatgtcgcaatttgctcacacaatgcttctttaccttcaatatccagatggttggtcggctcatccagcatgatcaattcatacttcgccaaactcagtcccacaaacagcaaccttgaacgttcaccaccactgagagtagccactttctgctgatggcacgagtaagcaaaaccggcaccaatcagcgccatcttgcgctgttcgtctgtcagtagtgcaaatggccgtaatgcatctatcaggctgtcgttatcatgcaattggtgtaattgctgatcgtaataacctgctgtaatggccggatggaactttatatcaggactgtggcgcatcgctgagagataacgttgccacaacagtcgcaacaaggttgatttaccacaaccattggcaccaatgatagcaatgcgatcaccactctttacctgatgaaagccggtggtaaacagtggtattgagccaccctgtactgttatggtggcatagtcaagttcaagaacgcgatcagcctgaataggctggccggttaatgtcaactgccactggtaaccttcagtcaatactgtctgcgcatctttcaaacgttcaatgtgtttttccatctgtttcgctttgcgtgccagatcttcgttatcataaatgcgtccccagtttgcaaggcgtttggcactggacgtaacacgatcaatctcgttctgttcaaactgatggcgatgttcatcactcatatctttttctgcgagagcttgacgggcctcagaacagggtaaacgataaaaatagagggtcttgtcgcgcaatatccatgtgcaattagtgaccttatcgagcagagtctgatcgtgggaaaccagaataaaactccctttccaggactgaagaaaattgcccaaccaccatagagtaggtaaatccagatgattacttggctcatccagtaatagcagatcaggctcctgtattaatgccctgcctaatagcagacgtgtgtgttgcccaccgctgagctgactggcaggttgtgcccacaaggtttcagcaaaaccgagctgtgtcagaagaatttccgcacgccagcgttctgtcacacgttcatcaacaggtaatttttgtaaaaccgcatcaattaatggctgattttccacgtcttccggtaaatgctgctcaatataggcagtcacacaatggctggcatagtgaatagtgccaacgctaggaagtagttgcgctgtcaataattttaatagcgtactttttccactgccgttatgaccaatcagaccaatacggtcaccagcctgaatagtgaaaaagacattattcagcaacatggcggtagatacttcgtaacagattgattttacagataataatgtgctcatagcttactcatttttcaggtacagagatacccgggttaagtcagggggcgacaacccagtaagctgaggaagagatttttttagataacttcgctcagacaggttatcgcagtgtaatactgtgaaagcctgagctctggcgattaccaaagaagtgtgaatattcgatcacatcacacaacatcataattagcctccttatttttccaaattgaacgatactgtcatcgtaacaaagctgtctatttacaggcaaacaataattaaataaaaataaccaggtatcaataaatttaatgactaacaggcggttatgcgttttttttagatattttggtaaaagctgcttcacgattaaaatcatgattcaaataaggacatatgagagttacctctttaaagcctttaaaatccacgcagttgcgtggatttttttattttattcttatggtttttctggcagttgtactcgaacgttaattactcgcccatcaggaatgtcgcataactcaccatcattgtaataaacaacttccccatcatcattaatactcttaacacgcttattttgcgcaaagatagcaataaattttaaactccctaaaaccagacatatattaaaaccatttctgtccaatatatgaaagtaactcttttccatccatttcatttcgaaaatatttataataacatttactttccaagaataaataaagcccaccatacaacaaaatattttaaccaagaagttaatataattgatcgtaattttaacttgtaattattcattccaaataaatataaatcaaaataaatcgacaaataattaataataaagcgcattattataaaataaaaaataaatatccgaataatataattcaggattattcaattagaacaaccaaaacacaaattttgcgataatggactttacatactatatttttacaccattattaaaagattagatatatatttttacctattgattaagatattctcggttttcaggaacattgcttatcatataaataaaaccctatattgttgatataaaacaaattatagtttctgaatctggatctcattttgagtaaagaatgaaaatcaattacttatctaatataccctatggatttcaagatggatcgcgacggcaagggagtgaatccccgggagcataatgtgaccggggtgagcgagtgcagccaacaaagaggcaacttgaaagatgacggggatgacgggtataagtatagatatttactattgacaatatgtaaagacgtgcatatctttatcttttacatttagtaaagaggtgtttgtatgccaatagttagccagaaaaggcaggtaacgttaccgcttgagcaatgttcgatagctaacattcagccaggtgatgagtatgagagtttcgtcagccgaaaaggagtcatctcaattgtcacaaagcgcaaaggggccgcgaaggggatattaaagggtatcctggccgatcaccaggtgagtgaagaagaatcacttgagagtgccatacacaaatgattgcggtagatacaaatattgttctcagatatcttctgcaagatgacgcgaaccagtctcaaaaggccaatgcactttttgaaggcaaacaaaaaatcttgatcaccgatgtggtcttagtcgagacaatttggacattgagaggcaagcgttacttgctacctaaagaggcgctgatagaagtgttgcacaggctcattgaagagcctaatgttgtcttcgaagatggtcatgcgctctggtgtgcgttggatgactacatcaatgccaaaccgattaaatgcggcggcaagacgaagcaggccgactttgcggatgcattgatagtgaataagtctcagcggtatggcataaaaaacaaaaaatcggtttcgccgctttatacatttgataaagccgccttggagatcgatggtacagaagagccttagaggaaaggcattatgctggagttagctaaagcccttgaaatccacgcagttgcgtggatttttttattttattcttgtgatttttccagcaattgcactcgaacattaatgacgcgcccatcaggaatgtcgcataactcaccatcattgtaataaacaacttctccatcatcgttaatactcttaacacgcttattttgcgcaaatatcggcgcatctctattttgacgatgataacattcaatggttatatcgccactggctgaatctaccaattcacaaacccaaataagatttaacccgttgctatctgccggaacaatagtaccaccatgaattccccattccccatctttagcaaaaccattgcagccgctgatacgatatttccctgtctctattcgcttgaccgtcaccccttccgcttcgcaagttaactggtaagttccgtctggatgaatatctaccactggactggaaactttaaggttgccattagtatctggtttggcgttgcttgttgaccagactttataccacggattccatttattgatgttaccgtcaccattgtgcgttctatagtataattcgctcttcggcaagtatgaggagtgaatcatcagctcataacccttaaaagtcccataccctcctgaaaatctcattccgggaccatgtacacctggaccatttaaccctactggatagccaaaatatgtcgaattctgaggaatgttatcaaaattatcgattgtagaagctgtattattcccaacaataaccggttttgtactaatcacttctaaagcgagattttccacaaaggcttttttatcaggaatgtctgcgccgttttggccttttgccaatcggttattagcattatcattcacatcagaaactagcttctgtgttaccgccagggtattactgttgccagttttatctgtaagctgagtaacacctttttgtgttaatgaggcatttggtacttcggtggcaattttttgttctaacgcgccatttaattgggcggcaagtttagcgatatccccattatccaaaacatcatcgccggaatatgtcgcaataaaattagccacaacagatgatattgtcgatgactgacgcaataccttattgagcaaatgaacagtaatattgtcgtctggtggaaacccaatctttaaactccggctttcttcatatccttcttgactcactatattagcattattaccaatagaaaaggctttaaaatcatttttagaactcatacaccctccaaaatcaaataatattattttaatttaaccaccgtgaaaatcattccccataattcacttcaatcatagtctagcttagaaaaacaataatggaatattcttacaacctaaattgccaactatttttataattgatagcaataaattttaaactccctaaaaccagacatatattaaaaccatttctgtccaatatatgaaagtaactctttccatccatttcatctcgaaaatatttataataacatttactttccaaaaataaataaatcccaccatataacaaaatattttaaccaagaagccaatataattgatcgtaattttaacttgtaattattcattccaaataaatataaaccaaaataaatcgacaaataattaataacaaagcgcattattataaaataaaaaataaatatccgaataatataatgcaggattattcaattagaacaaccaaaacacaaattttgcgataatggactttacatactacatttttacactattattaaaagattagatatatatttttacctattgattaagatattctcggttttcaggaacatatgcttatcatataaataaaaccctatattgttgatataaaaaaaattatagtttctgaatctggatctcattttgagtaaagaatgaaaatcaattaattatctaatataccctatggatttcaaggtgcatcgcgacggcaagggagtgaatccccgagagcatagcaaactatgtgaccggggtgagcgagtgcagccaacaaagaggcaacttgaaagatgacgggtataaatccataaaggaaaatagacatgaaagatatactcacaaattctgatcataaaattaaaactgtccaagagtggagagaatacgttaaacacagaggagaaaaatattctaaaacgcagcaacattcagataacatttttactcatttcttagaaattgagaatctttctgatatacaaagtccagccagtgtagccgcgacaaataaatacacactattcgccaagaaatcggccacatcaaataaatacccagtcagtgtcactgaagggctgcaaactatcattaacttatgtcgagtggcctcaggttatgacccgctggaaccggaaggtaatggcaatgcgcagaaattcacagcattcacagaagaaatagaaaaggttccctttctctctttactatgggcagacacaaatacgattactcaacaaagtcatgacacagatgtcttgatcgattcttttgttgaagcctttcaagggttatctcctcaggataaaattactattaagatttatttgaaaaagttgattcataccgctttatcatatgccgatcaaaaggaaaaaaaatccaatctggtgcaatatgctctgactaaaaccccaaatggggtgtcactcttactctattcttctatattgataataaagaaagtagataacaagggtactattaaattcacctctcattataatctttgccaggcagaatataatctcagccagaaaacgtgggaaatagtaagatcagtattcgagaaagaagataagataaccatagagtatttaattgattgtatgacaaccaaaatgaaagcataaactgaaaactctctgtcagtagattaattgatttatatacccgtaatcattgaagatgcttgattttatccgaaatggagatcattatcctcgctatgaaaatatttattacatcagaacaaaaaatcaaacttgaacgtcttcacgacaccactcgtgatggtcaggtacgagacagaataaaagcgatccttctggcttctgaagggtggagttctgtgatgatagcccaggcattgcgactccatcagaccaccgttgaccgccatatcagtgattaccttaatcaaggtaaacttaaatctgataatggagggtctgatagtttgctttcccgagaacaaactgattttttaatcaatcacttatctcaacatcttttccatcacacccatgaaatcgtggcctatgttgctcagctctggaatattacctttagcattcccggcatgaataaatggctacaccgtcagggtttttcttataaaaaaccttgtggcgtccctcataaattcgacgcagaaaaacagcgacaatttattgaatattatgagaatcttaaagtcacagcgaaagacgaacccatcctttttcttgatgctgttcacccgactcaaggcaccaaactcagttatggctggatgcgaaaaggcgagaaaaaaaccgtcaaaacaacaggaagccggactcgcctgaatatattgggtgccctcaacctgaatgccattggtcgtacggtgttccaggaatatcagaccatcaacgactacaacatttgctgttttttcaatgaaataagaaagtcttatcctgactatcatcaaaaaattcaccttattgtggatggagcgggttacaacaaagctcatcttgtgaaggagtgggcttatgttagcaatattgagttacattaccttcctccctatagtccaaatttaaacccgatagaacgattatggaaggtcatgaatgaacaggttcgaaataaccgttatttcgcggataaacatgaatttcgagacaacgtcttcaaatttttcaccacaacgctaccggatatagcggactcgctgatgtctagaattaacgaccattttcaggtgctaaaaactgcatcttgaagtttcttgggtatatcaataacattattaccaatatgtgctgatattattctcatcatagttattcaataaaaccattaaattaaaggagaatagacaaatataacataaagaatagaacatacgatcaatatatataaaaatgaattatctcaaaatgtgaatttcaaatcgataaatttcacaagcagtattttactattaatatgaaaatatcacataaaaaaacatttatccgtgaggaataagttaaattacatacccttaatatttgatagtgaaaaacatccacttatggatatacttagttcatacaaaaatatatttaacacttattaacaaaaatttaaaataaaaattaccaagctaaaaaaacagtaatattaagtacatgattatcgatttatctcactgttaaaaatagggttcaacattgttccctactttcaacagtaccctaacattcaatacttaacttaatataccctatggatttcaagatggatcgcggcggcaagggagcgaatccccgggagcatatacccaatagatttcaagttgcagtgcggcggcaagagaacgcatccccaggagcatagataactatgtgactggggtaagtgaacgcagccaacaaagcagcagcttgaaagatgaagggtatagataactctgtgaccggggtgagagagtgcagccaacaaagaagcaacttgaaagataacgggtataaatctattaaggataaaaatcatggaaaatatcttaaataatcctgattatgcagttaaaaaagcccaagaatggatagaacatattgaaaaaggaggcacaaggctccttaaagattgggaacgctcaggtaatattattatggagtatcctgaggctggcgattattctgatgtacagagcccagcgaatggcgcagctacaggaaattatacccagttggcaaaagattctgcctcaccctctaaaaacccactcagcattaccgaaggcttgcaaactgttattaatatgtgccgtgcggtttcaggctataatcctttagatcctcaaggccaaggtaataaaaagaatttcttctcatttacagcagaattatctggcgttccattcctttctttactgtcaacaagtacacaaaatgttattcaaaaaagccatgatgccgatgttttgatcaactctttcctggaaaacttcctaggattatcgagtcaggagagagagcagatgaaaaccccactgagacaattggctatcgctgcattatcttatgctggtagaaggcaaactcaatccaatttcgtacaaagtgttcttgctacatcaccaagaggtggcgtgtcattcttcttgtattggtctgagttttcaatcatcgcttacgaagatgataaaggtcttatcgaattcaaatctcattacttcctgccacaagcagaatataacctaaggtacgaatcatgggtaaatgtaaggcccgcattcgagaaagcacagaaggtatcattagaagattggattgacagtatgaccactcggagaaagcaaggaagtaacgtaagagcgctttgtatagaataatgtataccttatagattttaagatgcatcgcgacggcaagggagcgaatccccgggagcatagataacgatgtgaccggggtgagtgcagccaacaaagaggcaacttgaaagatgacgggtatagtgaaataacctcaaaatggtgtcggcaaaagcgttgtggacaccataaatttcatatgtgatgagggcgttcagaatccctcacgttcttgtactggcggttggtcacgttctgtcaagaaatctgccgtaacaccaagaccatcaaaccaactgtcccaagactcaccagccatatcaacctgtctcacaccttcgggaaaaccacgactttggaaagtcggacggcttacttgagaacggttacttttaaataccgttgctttctccacgaacttctccttgatagggattaatatcagcctgggatcaggctatttcaaccaataatgtatgacaaatattgcccaaagtctgcatcgcacgttccatttgctgattccaatcaaaagaggcattcagacgaaaggcatggttaaactgttcgctggtgcaaaacatactgcccggtgcaatactgatcccttctgccaatgccagttgataaagccgctgtgcactgaacagaggctcaaattccaaccagagaaaatagccacctttagggcgattcactttgactgaagcaggcatatagtcaccaattgctcgtaacatcagttgctgacgttgctccaatatgcgacgaaggcgacgtaagtggttgtcatatcccccctccgcaagataatcagcaattgccaattgcgtcggcatgctggcagaaacggtactcatcatttgtaactgttggattttcttggcatgttttcctgctgccacccaacccacacggaatcccggggccagacatttagaaaacgaggagcagtgcataaagttgttttcactgtctaaccctttcgccggtacaggccgttgctgatcgaagtagagttcaccataaacatcatcttcaatcagcaccacctgattactgttcaggatattcaccagccgtaatttactttcagcggacatcgttccccctagcgggttctgaaagtgagtcattaaccaacaagcttttattgggtatttctggatcacctcctccaacgcatccaaatcaataccgttttgtggatcagttttgatggctaccgctttcagacgtaaacgttcaatggcctgtaaagcaccgtaaaaagccggtgattcaatcaccacccaatcccccggttctgtcaccgactgtaaactgaaactcagtgattccatcgcacccgcagtgatgacaatttcatcaggagggacatgaataccatgcattgcataacggcgcgatatgttacggcgtaacttatcattacccggcggtaaattagctaaagcgctatgtggtgctattcgtctggcagcagccgctaacgctttggaaagtttaggttgaatcaataaggatggatctggaaatgctaaaccaaacggaataatcgcaggatctttgcacgcctgtaatacatcaaaaatagaagcgcttatttccacgctttcacttaaatgtaatcgctttcccccttttgctgcggcaaagggctgcaaacgtttagcgacgtaataacccgattgaggccgggaaatgatccatccctgactttctagtaattgatacgattgaacaacggtcatcaaactcaaacctgataacttcactgattccctcaatgaaggtaatctatctcccaccagccaggtaccatcttcaatatgttgaagaatttgcctggcaaattgttcataacgcttcatcaattcagacctctccgcaaactgttatagtcaatatacagaaaactgtcactattatagtcatttttttcatgctttacttgtccgcatacatttcctgcctttattcaaactaaaaataagaggttactatgtttggtttaagtgccttggaactggccagaattcaattcgcgtttaccgtctcgtttcacattatttttccggcaattaccatcgggctggcaagttttttagcggtactggaagggttatggctgaaaacgcgtaatagtgattacaaagtgctatatcatttctggtcgaaaatttttgctgttaacttcgggatgggcgtggtttccggtctggttatggcttatcagttcggtaccaattggagttttttctccgattttgccggttcaatcaccggcccattgctgacttacgaagtactgaccgcgttctttcttgaagcgggctttctcggcgttatgttatttggctggcatcgtgtgggtgaaaaattacatttcttcgccacctttatggttgcactaggtactctaatatccactttttggatactggcttccaatagctggatgcaaaccccgcaaggtcacgaaattgtcaataatcaggtcgtccccgtcgactggctggcagtgatatttaatccctcctttccctatcgcctggctcatatgtctactgcggccttcctcgcctcagcattctttattgcagcttccgcggcatggcatttattaaaaggcaatgactcgacagcaatgaaaaaaatgctatccatgtcgatgtggatgatcttgattattgcgcctttgcaggcattgattggtgatgctcacggtctcaacaccctcaagcatcaacccgctaaagtcgcggcaatggaaggccactgggaaaatcttcccggtgaagccacgccgctgatcctgtttggtatcccggatatggcgcgggaagagacgcgttatgccgttgaaattccttatctcgccagtctaatcttaactcacagtatagataagcaggttccggcgctgaaggagtttccaccggaagacagaccaaacgcgcttatggttttctggtcatttagagtgatggtcggcctcggtatgttgatgatagttgccggcttttggggactttggctacgctataagagacgactttatcagtcaaaagctttcctgcgttttatcttcttaatggcaccttccggcctgatcgccattcttgccggttggtttactaccgaaataggccgtcaaccgtgggtagtttatggtctgctacgtaccaaagatgcggtatccgcacacggtgaaatacatatgaacatcagtttgttgcttttcatcgcggtctacagctcggtattcggtgtgggttacgcctacatgatgaaacttatccgcaaaggtcccaaaaaggagttaaacaatgggtattgatctgccgttaatctggttcatcatcattgtgttcagcatcatgatgtacattgtcatggatggttttgaccttgggattgggctgctctatcccacggttaaaagcgataaggaccgtgatttaatgatgaacagcgttgcgccggtgtgggatggtaacgaaacctggttggtgcttggcggcgcaggtttattcggtgcttttcctttggcttatgccgttatccttgatgcattaacgatccccgtgacattaatgttatttggcctgatcttccgtggtgtcgcctttgaatttcgtttcaaatgcgcgcctgagcatcgtcatatctgggacaacgcttttatcagcggctctgtgatggcgacgtttgttcagggcgtggtggtgggtgcctttattcaagggttcccggtggaaaaccgagcttacactggcggctattttgattggttctcacccttccccctattttgtggttttggcctgataattgcttacgcactattaggctgtggctggctaattatgaaaaccgaaggtcacctacaacaagagatgtaccgtgtcgcccgcccgctcacttttctgatgctgacagttatcgccattatcagtttatggacaccattcattcatccggcaatcactgaacgttggttcagcttacctaacctgttgttcttccttcctgtgccactgttggtggtctggtctggctggaaactactgcactccatcaaacgtaaagctcattacacaccgtttctggtcgcactattgttagttttccttggctacagtgggttgggcatcagtatctggcctaacttgatcccaccgaccatcagctatgaagccgcggcagcgccgcaacaaagtttaggttttatgctggtcggtgccctacttatcatcccagtgattctggtttacacctattggagctactacgtttttcgggggaaagttaaccatgaacaaggctaccactaatcaaaacaccccacgcccttctgtatggaaacggataggctggatggcaatgatctggttatgcagtgtgatggctctttttgctgtttccacactatttcgccttctgatgacagcagcaggtatgaaattgaagtaattattaacactatttaacaaattgagctaaagttttcatcagtattgcagaacggaatcttagcctgatgaaaacaagttcaaataacaccatcttcaaaaaccaaaaactgtttgtaatcaactctattataaatttgtttttactttttatactgttgttgattgataaaccgtcgattccagatttaattttaccgttattgataatgttaagtattacaaatatctacttcctgataaaagtggtacataactctgctcctgtcaaagaatggcaacatgcaagatacaaagcagaaattaacgcactgaaacaaaaaaatagctatttggattttctctgtcaaagccatttcaaactacaaaattgtaaactgctacctgaaaagcttcaggagattttttctcacctcaatcgtctgatccctttctgtgaagccaaaatcatcttttatccatcacaacaagaatatttctttcgcaatccccatcaatgtccctattttgatatgccgctgattatgagatggaatctagatgataatattgatagctatgggacactctggataaaaacacacaggaatagtgatctcactcccgatgaaaaaagtctggttcaggatgtggtgacgttaatgacaaataaactattacgggaaaatcagatccaatgccaacaccagagtatgttggccgcagagagaaccgctatttctcgtgaactccacgattccattgcccaatccctctctttccttaagattcaagttaattgtctatatatcggcagtgataatttacccaagcaaagtttaacctcgttgaatatgattaaagatgagttaaatattgcctatcgccagctcagagaattactggcaacgttcaggaacgaacaacctcaatgtaatctacaagaatctttacagaccttgattagtgaatttaaccatcgtctaggcttcaacattgaattcaattaccgcctgacacatcagcacattcctgacagttacagcaaacatttgatacaaatcattagggaatgtttgaacaactgttataagcatgccaatgccaattggatcagtatccgtatttatcctatcgatgacaaaatcattaccgttgtcagtgataatggtcagggtatcaatctggactccgctaataaaaacaaatttgggctggctattatgcaagacagagtttctatcctaggtgggcaattacagataaaaaaccgtaaacatggtggtacagaggtagaaattcaattttcagtggattgaaaaaggcagatcaatcccattatcgacggcagcgcaatttatttaatgataataattatcattttcgttaattgctgttacactaactttggctttatcagataataaccttcggtaaattttccagaggaattttacgtgaccaataaaacaattgaagaaaaaaacatttaccgacctgccccccctagacttgttcaggtgaaaaacattttcgacgtgacacctaatatgcgcagcatgactttcaccggtgaatgtctggatagttatcccacggaatgtgaaggcggacacctaaagatattcttaccgcttccgggacaaactaaaccggtattaccgactttatcgccagaaggcccgatatggccgccgagtgaactgcgtccaataacgcgcacttactcggttcgagccatccgcaccgaacaaaaagagatcgatattgaatttgcactacatcacaatggcggcccggcggtagaatttgcttatagagcccaaattggtgactggatgggtattactaaccccggtggacctgatccattactgccaaaagtcagccactattatatggctggcgacccaagttctttgcctgctattgctgcgctattggcaacagtaaaaccagatgcaaccgggcaagtcattattcgtatcgaaagtgagcaagatattcaggaattaaaaaaaccggcaggaataacagttcactggatcactggtgacgttgaaataactgacacaatcgtatctgaattcaaatcctggtcattaccaacagaaaatgtcactttctggctggccggtgaggataagctggtaaaagaacttcgtcactatattcgccgggaaaaaggctatgaacgccaccagctatatgccattccttattggaggcatggctttgatgaagaaggttatcatgccctgcgtcatgaagtggtggatagcgacgattaatggccttacatatttatacccgtcatctttcaagttgcttctttgttggctgcactcactcaccccggtcacatagttatctatgctcccggggattcgctcccttgccgccgcaatgcatcttgaaatccattgggtatagataatgctgtaggaagaaaccaaaatacccaagatctcggtgactaaaaaaaggaatgggttgaatatcctaacgggcgaattgaccttcaccgccaaacgatagactactggaaaataaagtagttctatcagaatttccaataaaaatcattggccgtcagtcagcaggaagaaaaagggaaactggctgaagatcagagagttaaaatataccgaataatcagagaatatgctaaaagatcacaccgtgaggcgctcttgcaaaagcccccacggcatatttccatcggttatttacaataagccagcaacgttttctggcacaattgagaacgaacacaatcctcttgattaaaatggataacactgacgacttcatcatctgaaaatcttcccagtgcatcacgcaatcctgataccactcccactggcaaatcacattgacttatatcaccatttacaatcacagtaacattttccccaagccgggtcagaaacattttcatctgattaaccgtgacattctgggcttcatccagaattacaaatgcattttcaaatgttctgccccgcatataggcaaaaggcgcaatttccactttgccaatttcaggccgcaagcaatattgcaaaaacgatgcgcccatacgttttaataaaacgtcataaaccggtcggaaataaggcgcaaatttttcagccatatctccgggcaaaaagccgagatcttcatccgcctgtaatacaggacgggtaacaatgattctatcaatttccttattaatcaatgcatccgcagccattgccgcactaataaacgttttaccgcaacccgcctccccactggcaataatcagttttttatagtttattgcgcgcatataacgccattgcgtttcagtccgtggcaaaatttccgaagtatcccggttatcacgtgccataccaatagcttctacgccaccgggttgcactaaagaggttacattatcatcccgataacattgatggcgcaaatcccttttcatcatccgttttgcctctcgacgcgatttaatcactgctttctgtctactcatagcagtatcaccttatcgttgttttcacccatgcggtgtcatatcaccgatacaatcactacgttatttcaagcctcttttccgcttatttagccccatagaaaaacggtagtggaaccgccacatatattaatgaccttgatattcccgctagctcgcatatgatcggtatatcaatcattaacactactcaccattatttccatttagtgaaaactaacgaatcattatgacagtataatgacaatctctgagttatgacaaacaagccaaggacgctcaattaaaaataatcgacagtatcgtttatttagttttgcgagaaatttaattcattgaataatatgacttaatataagctaatgacttaacatcatagtagccattattgatttgactaccatggtattgatacatccagctactatccggcaaagaagtcactatctgaaagcactcttcttcaccggatggcaataatattattattgatgacaacagagcaaatagttaactataccctattgatttcaagatgcatcgcggcggcaagggaacgaatccccgggagcatagataactatgtgaccggggtgagtgagtgcagccaacaaagaagcaacttgaaagatgacgggtatatctgttttattaagtccccttacagtttccagccaaccgaaaacccgcatttcttgcttcaatttctgttttaaaatagaccgagttcttctcctgaatcaccttataacctgaacaatgagaaaaatggtagattttgctgttgttattccctttaattaatcctctagaggatgaatcagataatacccgttgtttctgggtatctgtttgactatttctctgcccttttatctgctcgctttttggaatgccagaggcggagtttttatgccataattgccatttctgttcaccggtaacaaaagggttatgatgccccataataccggtaattcggttatctctctcccgctcccatttactcggtggatattgacgatcccaggcgataaatagctgctgttgttggcgagacatggaaagattgtaacgatcgtgcatataaaaattgatccgagcgacctgcccttttacttcatctctcggttcaaacgttcgagatttaaaatcaactttactggtacaacgaccataattattcggcatattttttggtaacattccataactgaaattactacgatcgccattaacctcgccaattgatggaaccaaattatgtatatcagattccattgccctaaaaacaggatcggaagagacacaattcttcctccctccattccgccaacattgccgctgatgaccaaaaacccaggcgggaacaatatgttcccattcaattcgttcagcacgattctgttgtgacctgacttgataaccacacgaagaaaggattgcgcgtncaccgctcttacctgtccattgccaatcgcaaccacagtaaaatgtcccttcccctgacttaaattgatcatggtatatgcgtttacgcaattcaactttagcttgttcaaaagtagccggtgcggcaaaagaagataaaggagcaattaaactgaaacacccaatgtgaattgcccaaaaaataactttacgtttcaatgataaaccctacttatataaaaataccattctgattttaaccttttatgttgcctcataatcgacctataagacaaacattgtttctttgcatttcttcttagcatctcttttaaaaagaaaagctattcaatgaacaggttgagatatcacaaaatggcagttatcctattattgaggaatggatacagggccgatatacggccccgccttactgcaatttactaccagaatcatttattagcagaagcgctggtactctccatttcttcctgtaacctctttcgattcaagttccagagtgaatcttctggcatttggacccgaatatctaaacggcaagaatcgggaatatcacagggctccccatcttgatagaatatcttgttaccactgtcatcaatagatttgagtcgccaattttggaatctctccggtaaatgcgtatgttggcgatggaaagtctcaataataatagagccgtcagactgaacctgatcatcaacaaaaatcagttcgagattattattgtcgcgaggaacagaaatacccccattaacaccccaaccaccatcagcgttatagcccaagatatttgatatacgatatatgccggttccctgttttatcacttctgcaccttcagattcgtcattagtcgagaatgtgccatcagggtagatttctattaccggggaggctaccttgaggtttccgttggcgtctggcttagcatttatatcgtcccagaatttacgggtaattttgtaatctaaatttatatgatctgtacgatatgtatcgcttccatgaacaaaaattagcctatgactccatacttgatctattccttcacttgatggaccatttatattgctaaatcttagctgaacgccaaaacgatcagatggcagcccatatcgagtgaggaacggcgcattcggtttaaatccagcacaaccattgtatagattttcccgaccatccaaacgatcaatattcattgaatacattgcatcattagctagtaccgcacccacatcccccgcagtcagattgatatccccagtcaacgccttaccgtttattttccggctattaggtactttggcattaatattttcacgcaacgaattgattatttcctgaaccagcttctgcgtcacagccagtgtgtcattattacccatctcattggtcagttgaacaatacctttttgtgttaatgaggcactgggaatttttgctgtgattttttgttctaatgctcgatttaattgcgcagtaagtttagctatatcaccatcatccagaacatcatcaccagattgtgccgcaataaaattagccacgacagaagctatggttgacgattggcgtaatactttatttaacaaatgggtaggaacatcatttggtggaaacccactcagtaaatccctactctcttcatatctttcttgactcactacattagcattattactagtagaaaaagctttaaaatcatttttactcatataccttccccaaattaaataatgttcatttataatcaaaaatattcaacatcttaaaatatccttgttgatcactcaccatttttaaagaaaataaattcaaaatcgatcaccaaatcaactttacgaaccagagttcatttttatatggacttttatacgaatttctttaatcaaagcactgattaaaaaaccagtgccttgtgaatgtctgaggattataagacattaatggtattattcttgcggctgttcaggccaattaatatctggtgccgatgaaacatcaacccgacgcaataataccaaatactttttccaatctaacaataaagttttttcctcttccgatgccatttcagtttcaactgcatattgcaatacagtgatggcttcatcggcttgccgacgaaaaatagcccgttgttgctctgcctgttcaatttgactgactttttgagcttcaaagtccgttacccatttttcaccatcccattgatcaaaatcggtggacggttgctcgaatgttaatatttctggcaattcacccagtacagtcacttcttcctgtacacccgcttgcgtgttgtaagctatttttccacggtggtccgggacaatttcccaataacttccatcctcactgcgacgcacagccatatcatcagaatcggacaggtttggtgcgtccaaataagaatgcgctgacaaacccacgccttccgcaacatattcgaaatcagagccagagaattctctcgtataggaattagcatgataaacttttatccagccagcttgaattgctaatccgtcttcacctaatacagcggtttcagtatctaaaatattttcttgtgtcattattattctacctttacgatattattctgcttttacgatatagttaaatgcgatattacgggggcgggtttcatgaccgcctgtattgttagcaattgatgtaacagtggcactctcaagaacatcacgccccagcgggaactggtatctatctacaggaccttgataactagaaagaaattgcccatcagggagtcctttcgtaagttgtattctttttgtgttgtcagtctgtgcgcttaaaataacacggccactatcaacacctcgcccatcatcccagccacgaataaactcgcctcttaaatcgggtattctgccatcaggataagcttctgctaacttcggatactgtgatctactaaaagcggaaccattacaagtgaaataaccggaaggtggatgggacaacggccaaggaataggagagccaacgggaatactggaaatacctgaaattttttgctctaaagctttatctaaagccctattgaatcgtacagtaagtttagctatatcaccatcatccaaaacatcctcacctgattgtgtcgcaataaaattagccacaacagatgatattgttgaggattggcgtaataccttatttaatacatgagtagaaacattctcaggtggaaatcccgtctttagattctgactttcttcatacttttcttgactcactatattagcattatcactaatagaaaaggctttaaaatcatttttttggctcatatactcctctttaattcaataatatcattcagtaatcaatatattaaattttcgtacagatagcctctctcaattgacgctaatgatagtctagttcagaaaaataataatgaaatttattttataacttatagggttaattatttttgtataattgacactaataaatcacccaacacactgcaataaaacacatccagattatttgcatttatcatcttttactttatctttactatttataactaaaaatcttcatgaaaatatttcatacctttattaaaacaaatgaaaaaataatagtgacaaaaagttatttcattgaaaaataaaaaggccacactacagcgtggccttaagcaaggtaactcaccagtaaaaatcattgtttttcagcgaacaataacctgtaaattccccctccaacaatcccaccaataattggcatcacccagaaaaaccacaactgctctaaagcccaggtattctggaatatcgcaacagccgtgcttcgtgccggattgactgacgtgttggtaataggaatgctaatcaaattaattaaaaccagcgccaaacctattgctaatggtgcaaaacccggaggtgctcgtctatctgtcgcaccaataataacaattaagaaaatagccgttaaaacaatttcagctacaatagccgattgaagcgagaatccacccggtgaatgctcaccaaaaccatttgaggcaaagccactcgtggtcgcatcaaaacccacttgcccactggcaataacatataataccgcagcagcaagaataccaccgataacctgagaaataatataaggaataacttccactgccctgaaacgaccaccagcccaaagaccaattgttacagcggggttaaaatgcccgccagaaatatgcccaacagcatatatcatcgtcaatacggttaaaccaaatgccaaagatacaccgacaaaaccaatccctaattcaggaaatgccgcagcgaatacaacactaccacatcccccaaaaaccagaacaaaagttccaagtaattcagccgctaattttcttaacatgttttgtcctcatccagatatcaaaacgagttaccttgctgaaattaactatagccaataaattaaaatcatgcttatttttactataaccgcataagttgctgattcttgtggcatctttgtctgatattcactttaatccgggatttaatgcaacatctatcctgtgcagatcaactttttggtgaaaaatggatagcttaaaatcaattatcaccaaaataagttcaatattctgttctaaaaataggatgatccgatgcaaaatatctgcaccggattattacatcagtattaaataacacaatatctattaagcaatgagtactatacccgtcatctttcaagttgcttctttgttggctgcactcactcaccccggtcacatagtttgctatgctcccggggattcgctcccttgccgtcgcgatgcagcttgaaatctataaggtatatgtgaaaacgggttttttcactgctaaacaaatcattcatctgactaccaaaactgaaatatttgcatatccgacaattcctgaagcatttgagcctaataaatgggtggaaatattaggccgccgggaaccaacaacaattaaatctgctttaatctcatctgctgtcgataatactttatccctcggtgatccacaggctacggagaaagagactcgctcttttggcaaatctattttttcagccacttttgccaattcctcttctgatcttgcaatagatttcttggcaaaagagttgagcaaatcataatggtaactataactaattgaaaatcttgatatatcaggaacggcatggaaaagatgtatattagcatcagacaacttcgccaaatactctgcatgtgcaatcgctttatcggtcaactcatcttctgaaatatccaccggtactaaaatcgttttgtacatacgtactcctatatttatatactcgtcatctttcaagttgcctctttgttggctgccgccgcgatgcatcttgaaatccatagggtataactatttcaatgagtgtataaaatattacattatttgttgtgaattatttaactaaatcaaataaattaccgtatcgctctattttcaatcactcagagtcaagatgccacttatgtaatattcgatgaatgaaaggtgttacaacaagccccaaagtaataaagaacacactttccaaaaataccccatatatggcaataaaatatttaccggataaactaacaggaacgggatctaacccctgcgatcccagcataaataaagcgttaagcaaagattcagaaaatgtatgctcttctatcaggtaaaaccctaggacacccggaattattccaataaagaaaaacgttgcagcaataaagtaaaagcgtatcacccgccatacaaaatggtccaaacgaatcagtttatcagtaaatttttccacaattattgcatcctcaacaattctacaaaaccttatgcaatctcaatgaaaatgaaatcagagcaaatttaataaaaatagtgcaacccagcgttagctagcaaaccacccgaagatggctagccattatacccgtcatctttcaagttgcctctttgttggctgcactcgctcaccccggtcacatagttacctatgctcccggggattctctcccttgccgtcgcgacgcatcttgaaatccataaggtataaccaccttacctgataaccaaaacagatgttgtcgaatatttgacaacacctgatgcattagatcctaataagtgcgttgtaatattgggccttctagagccaataacgataagatcagcattaatttctgtcgctgctgctgttatttcatctcttggcgacccaaatgcaatagaataagataacctgtcagcaggaaaatcgatggcatcaatcagcgtttttaaatcatcttcggctttaattgtcgctttatccttaatttcatcatatcccaacgaatatgcgttaacaatcgcggatgaaattggcagtacatgaagaatatggagcttcgcacccgtttcttttgctaaagacagtgcatgcttaaccgctttactcgttagttcatcttctgaaatatctaccggtactaaaatagttttgtacatacgcacgctcctatatttacataccaaaccagactactacatttagtatacactatatcctgttaattactatgagttactgcctatctcaatagggctattttatttgcccttctttgccataaagagcgaacctgggcagtgctcaaaatcctcacgtactacgtgtacgctccggtttttccgcgctgtccgtgttcaaactgcctgcaacaattacgcctattgagataggctcttattcaactatatatatttttccaaataaaaattttatgaaaataggtgctgttcatttcaatacgtggcaaaagtgggatatgtacaggggcaataacattaacccctgagactctacctcactgccgatataacgcttttatttgctgaacggtattttcaaatatcttggcctgtttttcatcgcccatttctgcaataacacgttccagattcagtacaactctccctgcatgagcttgtcccatagttttaagaatagaggccaacagaactttcaaacatgtcacctctgttgccaaggtttcagtatcagatgaaggaattaaatcgattttattcatagtcgttacctgtttacgtattaattgcgtcatgaaaataataattataccacataattcatcccctatttttatacattttccaaatagatctacgccaaaaaacgttaaattgttgttaaaatcatatattttataaatatttatttagttattaattttatcataatcagaatatatgagatattatgattgcaaataaataatacttcctatcgtataaaataattctcttttgtctttggaagagataagtataatattcacattcctgatgaactttaaggataatttatctattctattgttttatataatctttaccaaaagttaaaaaacagacaattgaagttaacttttctgaaacaaattcaatacacaagcaatatcaatgaagctcatgtatgagcatagagccagttggagacacttttttgataaatgttttgttagtcgatgatcatgagctgatcagagttggtgtaaaacgtattcttgatgacgtaaaagggataaccgtagtaggagaagctaattgtggtgaagatgcgataaaatggtgccgagctaataaagtagatatcgtgttaatggatatgaacatgccaggcattgggggcctggaggcaacaaaaagaatcctacgctattgtcccgatgtccgtgtcatcatgttgactatctatactgaaaatcctttgccaatgaaggtgatgcaggctggtgccagaggatatctcagtaaagcctctacccctcaggacatggtaaatgcaattcgtgcagttaatgccggccagcgctatatcgctcccgatattgctcaacaaatggctcttagccaaattagcccacagcaagacaatccattaagttgtctgtctgatcgtgaattacagattatgctgatgatcacgaaaggacaaaaagtgagcgatatctctgaacaacttaatctcagcccaaaaaccgtcaatagctatcgctaccgaatgtttagtaaactaaatatcaacggtgatgtagaattaacacatatggcaatacgttatgggctattcgacacagagagtctattaaatagtgacggaacaatttgattcaaaaacatttttaaaaacagtaaccagtcaacctggcgtttatcgtatgtatgacacctcaggcacggttatttatgtcggtaaagccaaggatttaaaaaaacggcttgccagttactttcgcgcacaagtcaccagtcgtaaaaccgaatctctggttaaaaatattgttcagatagatgttacggttacgcataccgaaaccgaagcactgctgctggagcataattacattaagctctatcaaccccgatataacgttttactgcgagatgacaaatcctacccttacatttttctcagcgcagataaacatccacgactggcaatgtaccggggagctaaacatttcaaaggtgaatatttcggcccatttccaaacactcatgcggtacgggaatcattaatcttactgcaaaaactttttcctatccgacaatgtgaggatagtgtctaccgcaatcgctcgcggccatgcctgcaatatcaaattggtcgctgccttgggccttgcgttaaagggttggtaagtgaagatgaatatcagcagcaagttgattatattcgtctgttcctttcaggcaaagatcagcaagttttaaccagattaattgaacgaatggagcaagccagccagcaactgaaatttgaagatgctgcaagataccgtgatcaaatccaggccgttcgtcaggttactgaaagacaatttgtttcaggaacagacgatgacctcgatgttatcagtgttgcctttgacgcgggcatggcttgcctgcatgtactgtttatacgtcagggcaaagtactgggtagccgaagttactatcctaaaatcccgacagggacaacgcttgatgagattgtacaaacattccttggccaattttatttacaaggcagccaaaatcggactttgccctcagaaattttgctggattttactctgccagagaaagacattttgtctgattctttatctgaaatatccgggcgaaaaattcatattcaaacccggccccgcggagataaagcccgttatctgaaacttgcccgcacaaatgcaacaattgccctatcgacccgcttatcacaacaatcaactattcaccaaagattagactctctcaccaaattagttaagttagcaaaaattcagagaatggaatgttttgacattagtcacactatgggagaacaaactgttgcatcctgtgtcgtctttgatagcaatggtccactacgttctgaataccggcgctataatatcagtggtattactcccggtgatgattacgctgccatgaatcaagtactacgccgtcgatacgggaaagcattagatgagtcaaaaattcccgacattattttcatcgatggtggtaaagggcaattagctcaagcaatcgatgtctttcagtctcttgatgttgaatgggataaaacgcgacctcaattaataggtgttgccaaaggcagtgatcgcaaagccgggcttgaaacgctatttttcgcaacggaggataaaagtatcgcattaccgccggactctcctgccctgcatgtgattcagcatattcgtgacgaatcacataatcatgcaataaccgggcaccgtcagcgtagatctaaagttagaaacaccagtacactggaatctattgaaggcgttggaccaaaacgccgacaaatgttactgaaatacatgggaggtttgcagcctttacgtaatgcaagtgtcgaagagatcgcaaaagtaccgactatttcctatgcattagcagaaaaaatttataatgcattgaaacactaagtacattgatgcaccatacttataaattccactatagccagatagttaagaagcactatgcaattaaatataccaacatggctcactctatttcgtatcgccctgatcccattttttgtcctggcattctatttgccattcacatgggcgccgatggtttgtgccataatttttattgtcgctgcggcgacagactggtttgacggttttctcgctcgcctttggaaacagacaactcgctttggcgcatttcttgatcctgtcgcggacaaaatcatggttgcggccgcattagtcttagtttccgaacactatcatacatggtggataaccctgcccgcagcaaccatgatagcgcgtgaaattatcatctcttctctcagagaatggatggctgaattaggcaaacgcagtagtgttgccgtttcctggatgggtaaggtaaaaacgacagcacagatggcagcgttaattgctttattatggcgccctaattttgaattcgaattgggtggattcatattactttatgttgctacggtgatgacattttggtcaatgtttcaatacataaatgcggcttggtctgatttgcgtgaagcttgatcgaaatgacgtaaaaaccatcgaacaaacacggtgtaacaataattgtgttgactcgatacgtgaagtaagtagaatgcaacgcatcgaacggcacatgagatttacgaaaacaaataagtaaatcagctagttcaaagcggtgcgggaatagctcagttggtagagcacaaccttgccaaggttggggtcgcgagttcgagtctcgtttcccgctccaacttactgttcagaagttggatgctgaattagtcgttgaatatagaaaggcgcgttggcagagtggccatgcagcggattgcaaatccgtcaacctcggttcgactccgggacgcgcctccaaattcagcccaggtggtgaaatcggtagacacaagggatttaaaatccctcggctgtaaggctgtgcgggttcaagtcccgccctgggcaccaaatgaaattcgctgataaaacagtgagttagaaaaaagaaaaggccaccgcaaggtggctttttttatgccggcccctccccttcctaacatgctttcctaacatcgctgtggtgcaatgaataaatattcactaaaagcgctcaattaatcctcttttctaatctgcctgtacggcagtgcaccgcccactctccctttgtgtgcgggagaagtttttctaagctgcctgtacggcagtgcgcattacgggtctgactatattcaaggatttctatttctaagctgcctgtacggcagtgcaccgcccactctccctttgtgtgcgggagaagtttttctaagctgcctgtacggcagtgcaccggtcacgccattgcttcagggagttttcaaatttctaagctgcctgtacggcagtgcacatcaccggcattgttgccgttcgtcggcatcatttctaagctgcctgtacggcagtgcactaaccctcactatatagaagagtgcaaacgtatttctaagctgcctgtacggcagtgcacctttaaagagtaatgataagcaggaaattacgtttctaagctgcctgtacggcagtgcactaaccctcactatatagaagagtgcaaacgtatttctaagctgcctgtacggcagtgcacctttaaagagtaatgataagcaggaaattacgtttctaagctgcctgtacggcagtgcacacttaatgctttgccattaattttccggctgttttctaagctgcctgtacggcagtgcacttgttacatattaaccccaacctattgaatgttaaagagcaaccatgataaaaaataaaaaacccttttttgtgggataaacaatatttacttaaaaatcaataaattaaaatttgccgttaaaaaagggtcaaaattttttccatccaagtagaaagcagtctcttcttctatttctagctatcaagcgtatttttgttcagccattacgccgctctcactatgtaattaaatgctatgttgcgagggcggttctctgaggctacaggaacaacccttgacgcctcgaacccaaagccgtatggagtatctgtgtcagaaatatttatcgatttgaaactgccatctgtcgctattccaagaacttgactagcataaaaagcccctcttgttgccaaatgataatttagtgctatcatgccggcgaacgaaccctgaatatttcggatagcatccccctgatgcgttaaaattctacggccactatcaatacctcgtctatcatcccaaccccgaataaattctcctctcaaatcaggtaagttaccatcaggataagcttctgctaatttcggaaatttcgacttatcaaagaccgccccattacactgcaaccacccagcaggcggcacggcagtcggccaaggaacaggaataccgacaggaatgttagaggtatctgaaattttctgttctaatgctttatttaattgagcggtaagcttggttatatcaccattatctaaaacatcctcgccagattgttccgcaataaaattagctatgacggctgatatagttgatgattgatccaacgccttatttaacaaatgagagtgaacatcatttgaaggaaactctgtctgcaaatccgaacttattttatatttctcttgactcactatgtttttattattaataacagagagagctttaaaatcattcttgggactcatatgtcctccttgaattaaataacattatttcgcaactcacatcaatcaaagtctttacctcggctgttccggccattcaatatcgggagacaatgaaatatttactctattgagcattaccctatattttctccatgtcagtaaggcggatttttctacttcggtagcgatatttaaatcaacagcatcttgcagtaatgcaatggattcactcgcgtgtcgcaacagagttacacgctgctgttccgcttgttcaatttgatttgcttttagagctacattatcagtgacccattttgtgccatcccatttatcaaaaccggtggtcggttgcttgaaggtcagagtttcaggtaattcacccagttcagtgattttctgttgagttaatgttaacgtgtcgtaagctattttcccccgataatcagggacgatctcccaacacttaccgtcttcactgcgacaaacagccacatcatcagaatcgggaaagtctggtgcatctaaataagaatgtgctgataaactgacaccgagcatgacatattcaataccagcgttaataaattctcttgttatttgattcgtgtgataaacttttatccaaccgggttgaattgctaatccgtcttcacccaatacagcggtttcatgttctaacgcgtatttttgttctgtcattatgctgcatgctgctgctctcactatgtagttaaatgctatattacggggcctcgatacccctataaatgcggaattcgcaatccagtctgcctgagctttataatatacagcttttaccgaagtatttttattttgtggaatatcccactgcaattttgcaaactcattgcgtgagagggtaatcataaaattattagcccgatcaacattctgtaccaaataagccccttcctgccatgacaatattgaacgagatggatccacatttcgcccactatcccagccacggataaattctccccttagatcgggcaatctgccgtcaggataagcttctgctaactttgggtactgcaatttattgaaaaatgcaccgttacaaacgagatagttgacaggtggatagggtaacggccacggaatgggggaacccacaggtatattaatttcttcacgtaatgaatttattatttcctgagcaagtttttgtgtaaccgccaatgtattgctattgccaaccacatttgtaagttgaacaatacctttctgtgttaatgaagcatcaggaacctttattgtcattttctgttccagcgctctatttaattggctggtgagtttctctatattcccatcatccagaacatcattgccagattgtgtagcgataaaattagcgactacagaggatatcgtggaagactgacgtaatgccttatttagcatatcagtggtaataccatcttgtggaaacccagtctgcaaattctgattttcttcatatttttcttggctaattacattagcattatcgctaatagaaaaagctttaaaatcatttttttgactcatatccttactccttaagcaaaataatattttttataatcaacatatttaattactgtaaaaataatccgtctgtaattcattaaaatcaaagtctagttcagaaagaagagtaatacagcattcctatttattaggagattgactatttttatataattagcagtaataagtaattaaatattttagaatcgaaaacatacccaaaccatttatatttaacatctgaaaactattctgctcttattccttctatctcttcctgtaacgcctgctattttaaattccaagatgaatcttctggcatttggacacgaatatctaagcgacggtgttctggaatgtcataggctctctatcttcataaaacacacattcattgttctcaacgatacacttgagccgacagttctgaaaatagattggtaagtgaaaatgttggttttttaagctgcctgtacggcagtgcacaataaaaacgcacaccctcataactaaaaggttttctaagctgcctgtacggcagtgcacctgtcatgattatctcgctatgttagttgtattttctaagctgcctgtacggcagtgcactgttacatattaaccccaacctattgaatgttaaagagcaaccattataaaaaataaaaaacccttttttgtgggataaacaatatttactgaaaaatcaacagattaaaatttaccgttaaaaaagggtcaaaattttttccatccaagtagaaagccgtctctctttctatttccggctatcaagcgtatttttgttcagccattacgccgctcttactatgtaattaaaggcgatgttgcgaggacggttctccgaagctacaggaacaacccttgacgtgtcgaacccaaaaccgtatgtagtgtatacagcatcccgggtaaaatgatctactgatttaggattaccatctgtagccacgccaaaagttgcgttaccgtaaaaaaccccttttgctgccagctcaaaatgaagtgctattgccccaggaaatgaacctacaatatttctaatggcatccccttgatgagttaaaattccacggccgctatcaataccacgaccatcatcccatccgcgaataaattcgcctcttaaatcaggtaatctaccgtcaggataagcttccgccaacttcggatactgtaatttattaaaagctgaaccattacaagtgaaataaccgaatggtggatgaggtaacggccacggaataggagaaccgacaggaatttcattggctgttttcatccggttgtctatctcttcgcgggtatattcacgtaatgaatttattacttcctgaacaagcttttgtgtaaccgccaatgtatcgctattaccaaccacatttgtaagctggacaacacctttttgtgttaatgaagcactgggaatatctgttgtcattttttgctctagcgctttatttaattgagcggtgagtttggctatgtttccatcatccagaacatcattgccagatcgtgtcgcgataaaatcagtcacggcagatgataccgctgacgcttgacgtaataccttatttaataagtgggtgggaacattatctggtgaaaatccagtttgtaaactctgatttacctcgtatttgtcttgactgattacattcgcattatcactagtagaaaaagccttaaaatcattcttataactcatatactttctcctgcaattaaataatattattttacaaccaatatattgaattattgtaaaaacaatctctcttgcaattcacgccaatcaagtctagttcagaaaaagaataatgcagcgttcttattacttataaggttaattatttttatataattggtagtaataaatagttcaacattagaaacgacagccggaaatttatctattaatacccattacgtatcactattgacattttaattaaattacccagatatacgtctcactgccaacccagtaatttccctgttttttctcttttttctgcaagatggtttgactggatttactatgtttacgcttgacggtgactttttcttgagattcacctgtatttcgtcaacaaaaattcacatagccaggtttgccaaattgatctatatccaatggatttcaagatggatcgcgacggcaagggagtgaattcccgggagcagagataacgatgtgaccggggtgagcgagtgctgccaacaaagaggcaacttgaaagataacgggtatatttggctaaattcgatatttttaatataatccatatctgaaaaatgatacggctaatcagtgcagggttttgatagaaaaatgaacaaggtattatcacataaagaagagctaagccatttaacagcatgtttactcagcgaagttatctgttcacggacatcgttttcatggttcaaagcaatccatcgagcccttaaatgcccagaccgcaggttctatttctggtggagaattgctaattacttatataggacaaataaagccaagaaaatctcgattcgtatcaatagaaatttaagaaataaatatggatgtgatttaggattaggctgctatataagaaaaaatttacgtatatctcattatgttggcattgttatttcccgcacttgcattattggtgataattttcatgttttacaaaatacaaccattggcgttcttaatgaagatattcaagggaaaataagtataggtaatgatgtaaaaataggtgcaaattcttgtattataagtgacaacataacaattggagataatgtctacataggcgccatgtcatttatcaataaagatatccctgctgattgtattgcatatacgcctaaatctcaaaatgagataaagataaaaaagcaaaaaataattaattgaacattccaatttaaaataaaaaatggtaacacaatatgtttttaaaatataaatatcttttaaaactaggtatgctctgtaagcagaatataacaaaatcaatatacagaaatgtatccagtaaaaaaatgaaacacaatatgaacttttggcctcacataaagatctcaagaaacattaatggcaaaatcgacgccgtttcattcaataagaaaagtataaacatcaatgaattcccaaaaaaatcagaaaaacccttaatcattattgcatctggaccgtcggtatctaccatcaaaacagatttttttgatgataccaaatttgatattatgggtgttaacggctcgtatgaattatcaccagaggtaaaattcaaatatcatgttataattgaccgaacattcattctaaataggaagaatatcgttttaaatatattaaaagataatgaattgatactcttcacaacaatggattgtctcaatgatatcttaattcattacggttatcttgaattaaaatgtaaagtcattattattgagaacattgaccagccagtttatcaacaggaaaaagaactttttgaaataaagagtgatgaaataataatacagaacagtgtcgccttctcattgaacttaaatctcggattctacaacggaacaacagtggcatattctgctttgcaaatagcattttttttggggtataaagaaatatatttcgcaggtctagacatgaacaatttttcaaaaccaaggttttatgaaacccaaaatgacaagctagataccaaattaaataataacttacatgatttcatcattccttgtttcaacctggctcatgaaatagccataagaaaaggagttaaaatttataatctatcgaaaaatagcgctataaattcatttgaaaagttagattatagaaaaatttaagtcattagatttcttataagcagagcaacgagataattaataaatttttcatattcctagattgatttattttttatctcaaaaattttaaccattataattttacaaaaagttaaaatgatcacagatacatttcatttggtcttatttcaattaagggatttttattaattcccaaaatgttaaatctattgttcgatatactctatggatttcaagatggatcgcggcggcaagggagcgaatccccgggagcatagataactatgtgaccggggtgagtgagtgcagccaacaaagaagcaacttgaaagatgacgggtatacaatatgccgagactattgatacccattcatcactaatgaacatcgaaaaaaataagtattaccggctatagttggacattcataaaaaacacccttactaaataatttttctgtgaaataatattcataaatacatttatgtttatttaaaatttcattgttaaataataaataatttaattaatagttattttaccttgaaaagcaaattgttattctatgctatagaatcaaatcatgttacgtagaattattacttaaatcattcagataatgtcttaagtaatcaccaaggatttactatgcaaaatataaaaagtaaactaatcagtatcactttaatcttaacgtgtacgaagaataaaaatggagtcatttaaacatataaattatatttgataatcttaaaatatgaacaagaattccgttactaagataaaacatactttgaaacgatgcagagccactttgctagaaactcactcatttggagaccacgacaagaaaaataactaccctcttttacaccctataaacattgatcacttagggtcgccgaatattatataccctatggatttcaagatgcatcgcgacggcaagggaacgaatccccgggagcataggtaactatgtgaccggggtgagcgaatgcagccaacaaagaggtaacttgagagataacgggtataaatttatcatcactataataggcattaatcatgaaaaaaattaatggaacatacatttcatcacaaataataaacacaatggaagcaagcaatgaaccgtggggaatcaaagataaaaattcacgctttatttatggtaacccggccctaaaatctattcaaaacattccaacatcatttgattatgaagggctttttgatgacgaacttccttggggtggagcggcgtttgcaaaagaatttattgatcatgataaaattgtaatgacaaaagggaaaagaatctgttcacttgaaacatatacatatggaaaagaaaacattttatcgtcttacttccaagaaaaattaccactatataacgatgcaaaggaatgtataggcatactttttcatggatggaaagccaaagatttttcattaataaacttatatcaatattataacgttctccccacatctattatatttcaaccaccaacagatacttttacccaacgtgagtgggatattattttcttctttttacaaaaatataccaggaaacagattggaaaaatattaaatatctcttaccgtacaattgaatcccatatggccaatatatatcataagataggtgttgattccaaccaacaactggaagaatattgtctcatcaacaattttaaacgttatgtacccgaaaaatttttactattttaataattttatttactattttttagtcataaaaaacatgattaaatagtttatcgctgtcggtatgatacaggtaatatatgaaaattataccgacacaattttcatatattagaaacatcagttatataaacagtttactgcctatctcaatagggctattttatttgccattttgaacctgggcagtgctcaaaatcctcacgtactacgtgtacgctccggtttttccgcgctgtccgtgttcaaactgcctgcaacaattacgcctattttatttttagaaaaataattatttcctgttacagttactcatatttaaagttcacatcttaaataaaaataaatttaatcagcagaaagaattggcttttttccatcataaaacacagctattttaaatatcacaaacaaataaatcatttaaataatatcattattgaactaatttatctgtgtaaaattgatcgattctcaactgataaattactctcatccattatagaaaacacggttaattatattaagaaaatttacctcaaattaaatctataatggcatgcacaactaaacaattctcgtaataaaaatagccacaataattattttctgaaaaagtctattattactgataataaagtattaaactgataatatgattcaaacatatcacaacttaaacccaaaatgggtaaaaaggaattataatatgagtaatcgcatagctatatcatctcaagttattaatacattggcagtaagcaacgagccttggggaattaaagataaaaactcatgctttatttacggtaatctagcattaaaatctcttcagaacttttcaaattcatttgaatttgaaggggcctatgaaaatgaacttccttgggatagcgctaaatttgcggaacaatttattaatcatgataaaaaggtaatggaaaaacagcagagaatatgttcaatcgaaacccatatatttggcagagagcaaatcctatcgtcttactttttcgaaaaatcacctttttaccataaagatggagattgcatcggagtcatatatcatggttggaaagcaaaaaactattcattagcctatttacatcaataccacgacaaactaccggcctcaattatgctgcaaccaccaacggatctttttactcaccgtgaatgggatatcattttcctctttttacagaaaaataccagaaagcagattgggcggatactgaatctagcttatcgcactattgaatattatatgactcggatataccgtaagataggaattaattccagccaacaactggaagcgtattgtcgagccaataattttaattactatataccggaaaagtttttattgtcttaaattacgtatttattcctagtttttacatattacccttatccattattaatggagaaaataatccgccctgtttaaatatttcatttaaaaacatcatattagggatataccctatggatttcaagatgcatcgcgacggcaagggagtaaatccccgggagcataggtaactatgtgactggggtgagcgagcgcagccaacaaagaggcaacttgaaggataacgggtatataatcacggaaatccttctcttctggcattggcagcgattcaatatcactaccctctttatccgggattggtaatacggttatttacgacggaataaacgactgctcttcatttccggtatgcggtggagccttgcattcctgttcattcggcgtccataaaatcgtcggtcgattttctcccggctcccagaattcataattaccggtagtcggattcaatctcatcatacgaaccagcacgttatccaaaccactttccgggctgacatgatagccctgaaccgtcatctttccgtttttttcatctctgatccaacgaaagcgaatacgagtcagcgccttaccggaccgttccgcaattttactcaggtgataccgatttaattcgtcctcttcgccttgataatgaaaatcaggtcaattttttgcctccgacgttacctcgccggcactgtcaaagcagaaaatcattgatacaaactgtgggaaatagagtaagaacgtgatggtggcaaacatctaagtggaacttgaaatacaactttatatcttgggctataccattttaagtaagttttttacttaattattcttcgataatttaatttcatagaatttacctaaccttaattttatttaagaatagctattgtcagcagtaggaaaattcaaactcggtttttagattgaaaactctatttagttgattattctgataattccaaaatatagtttatctaattacaatgctctaaatacgccgtttaaaaagcattctttaattgatcgaatattattccgattaaatgtcattttttcgccattatcccgcgccaaaaataacgccttctttttcattctattacctatcatcgttataacaaccgctccttcacgcttcgattaatgacagaaagttttgatctacgtcacttaattattcatgacttaaaaaatttattcattaattttgctgtttaataagttaactaaaatatttttatactaaatagtatttttagttatattcattaatgttaaaagtatcactatataacaataaaaggtttaattaataaatatatgtattttgacgagcaagttattatattctattatattaccaaggcattttaagtataattagttagcaaacatgtcagataacaactgaaataatcattcaggagtcactaatgcaacatataaaaaatagacctaataatatcaccccacaattaattcatatgtgggaaaacagtgatgaaccttggggagctaaagatctccaatcgagatttatttacgccaattccgctttttatcaactacacaatttacctgacgatttcgagattaccgggcttaccacaggtgaattaccctcacctattgcagaatatgaaaaagaattccatcgtcaggatcaaaaagttcttcaaactatgcaacgtgttagttcactagaaacgcatccatttgaagaacataagattaagcaaatctatctttgtaataaatacccactttgcgatgaagatggcaattgtattgggctcacttttcatatgtgcaaaaccaaaaacttttctactgcctactattatgataaaacccctccggcaacgttggaatttatcgcccctaatgacaaattgacacaaactgaatgggaagttctctttctaacgctacgttcattagatgaagagaaaatcggtgaagcgttaatgataagtgccgaagatgtggttaatcatattcagtcaatctacccaaaaattcaatttatcattacacgaagaattaaaagatttctgtaaagaaaataaacttgacgcttatattcctgcaagatttgtcactatcggcagtgtggaattaaattgattacaaaattaaatatcaataagctaattttaaggctagaaaaaggaatgatactatgagtaacaagataatttcatcgcaaatcattaacacaatgaagcaatgtaatgatccttggggaataaaagacaagaactcatgctttatttatgctaatcaatcatttaaaaccctccaaaatctttcaaattcttttgactatgaaggagtttttgatgatgaaattccctgggatggagctgaatttgcaaaagaatttattactcatgataaaactgtaatgacaaaagaacaaagagtgtgttcacttgaaacgcatgtatatgggaaaaatcaaattctgtcatcctatttttttgaaaagctacctatttatcatgaagatggtagctgcatggggattctatttcatggttggcaagctcaggatttctcattcacccggctattttatggaaaactgccggcatctattatgttccaaccaccgaccgatctctttactcaacgggaatgggatgttattttcctgatgttacacaaatataccagtaagcaaatcggtaggatgttaaatatttcctatcgtacggttgaaacccatatctcacgcatatataaacgaattggtcttcattctactcgtcaattagaagattattgccgtaccaatgattatgatctctatgtaccagaaaggtttgtgcatccagaaagcagaatgtttccctgatccttagattaaaaggagcttttactgatatgaagaagaactacgcactatcacctcagattattaatacaatggaaatggaaaatgagccgtggggaataacggatagttcttcaaactttatttacagcaatgcagctaaagaaaaaggggtaatagcatggacaataaactaattatttcatctcaagttattaatacaatggagcagagtaatgccccgtgggcaataaaggataaaaactcacgcttcatgtatgccaatcaagcatgtaaacatcttcaaaacatttcaagctcttttgactatgaaggactttacgatgatgaaattccttggggtggggccgaatttgccaaagaatatatcattcatgatcaaaaagtgatggaaaaagaagaaagaatatgtttgcttttaacacataaatttggaaaagaacaaattctttcgtcttatttttttgaaaaataccctctttatcacgaagacggaagctgtatgggaacgatgtttcatggttggcaagttcaggatttctcattcacccggttatttcatggaaaattgccagccaatattatgttccaaccaccgaccgatctctttactcaacgggaatgggatgttattttcctgatgttacaaaaatataccaataagcaaatcggtataatgttaaatatttcctaccgtacagttgaaaaccatatctcacgcatatgtaaacgaattggtcttcattccagtcggcaattggaagaatattgtcgcaccaatgattatgatctctacgtgccaaaaagatttgtgcaacctagaagcaaaatgtttccttgaccattagattaaaaaggagtaataacatgagcaataaactaattatttcatctcaagttattaatacaatggagcagagtaatgatccttggggaataaaagatgagaattcatgccttatttatgttaatttggcattaaaatctcttcataatgttccaaattcttttaactatgaagggcttttcgatgatgaaattccttggaatggtgctgaatttgctaaagaacatgtgactcaagataaaatagtgatggaagaaaaagaaaggatatgttcactcgaaacacatctatttgggaaagaacaaattctgtcatcctatttttgtgaaaaataccctctttaccacgaagacggaagttgtatgggaacgatatttcatggttggcaagtccaggatttttcattcacccgactattttatggaaaacttcctgcctctatattatttcaaccaccgactgatctctttacccaacgggaatgggatgttattttcctcctattacacaaatataccagcaagcaaatcggtagaatgttaaatatttcctatcgtacggttgaaacccatatatcacgcatatataaacgaattggtcttcattctactcgtcaattagaagattattgtcgcaccaatgattatgatctctatgtaccagaaaggtttgtgcatccagaaagcaaaatgtttccttgaccattagattaaaaaggagtttttactgatatgaagaagaactatgcactatcacctcagattattaatacaatagagatgaacaataagccgtggggaataacggatagttcttcaaactttatttacagcaatgcagttaaagaaaaaggagtaatacatggacaataaactaattatttcatctcaagttattaatacattgaagcaaagtaatgacccgtggggaataaaggataaaaactcatgctttatctatggcaatttggcattaaaatctcttaagaatttttcaagttcatttgaatttgaaggactttatgagcatgagttaccttgggatggggccgaatttgccaaagaatacatcgctcatgatcaaaaggtgatggaaaaagaagaaagagtatgtttgtttttaacacatacttttggaaaagaaaaaattctttcatcttatttttttgaaaaatatcctctttatcatgaaaacggaagttgtatgggaacgatatatcatggttggcaagctcaggatttctcattcacca

(The sequence listing continues in the following parts.)

1-56. (canceled)

57. An isolated nucleotide sequence derived from the Photorhabdus luminescens genome, comprising a sequence selected from the group consisting of SEQ ID No. 1 to SEQ ID No. 41 and SEQ ID No. 5826 to SEQ ID No. 5834.

58. An isolated nucleotide sequence derived from the Photorhabdus luminescens genome, selected from the group consisting of:
a) a nucleotide sequence comprising at least 75% identity with a sequence chosen selected from the group consisting of SEQ ID No. 1 to SEQ ID No. 41 and SEQ ID No. 5826 to SEQ ID No. 5834;
b) a nucleotide sequence comprising a fragment of a sequence selected from the group consisting of SEQ ID No. 1 to SEQ ID No. 41 and SEQ ID No. 5826 to SEQ ID No. 5834;
c) a nucleotide sequence complementary to a nucleotide sequence as defined in a) or b);
d) a nucleotide sequence of the RNA corresponding to one of the sequences as defined in a), b) or c); and
e) a nucleotide sequence as defined in a), b), c) or d), which has been modified.

59. The nucleotide sequence as claimed in claim 58, wherein the nucleotide sequence is a fragment of a nucleotide sequence selected from the group consisting of SEQ ID No. 1 to SEQ ID No. 41 and SEQ ID No. 5826 to SEQ ID No. 5834, and wherein said fragment encodes a polypeptide selected from the group consisting of SEQ ID No. 42 to SEQ ID No. 3855 or a polypeptide encoded by a sequence selected from the group consisting of SEQ ID No. 5835 to SEQ ID No. 10784.

60. The nucleotide sequence as claimed in claim 59, wherein:
a) said nucleotide sequence encodes a polypeptide selected from the group consisting
of SEQ ID No. 61, SEQ ID No. 62, SEQ ID No. 67, SEQ ID No. 171, SEQ ID No. 221, SEQ ID No. 268, SEQ ID No. 288, SEQ ID No. 380, SEQ ID No. 426, SEQ ID No. 438, SEQ ID No. 448, SEQ ID No. 453, SEQ ID No. 455, SEQ ID No. 456, SEQ ID No. 458, SEQ ID No. 501, SEQ ID No. 516, SEQ ID No. 530, SEQ ID No. 542, SEQ ID No. 551, SEQ ID No. 720, SEQ ID No. 761, SEQ ID No. 762, SEQ ID No. 814, SEQ ID No. 859, SEQ ID No. 860, SEQ ID No. 861, SEQ ID No. 862, SEQ ID No. 869, SEQ ID No. 1079, SEQ ID No. 1168, SEQ ID No. 1174, SEQ ID No. 1176, SEQ ID No. 1413, SEQ ID No. 1414, SEQ ID No. 1415, SEQ ID No. 1416, SEQ ID No. 1417, SEQ ID No. 1457, SEQ ID No. 1651, SEQ ID No. 1856, SEQ ID No. 1869, SEQ ID No. 2021, SEQ ID No. 2080, SEQ ID No. 2152, SEQ ID No. 2162, SEQ ID No. 2173, SEQ ID No. 2251, SEQ ID No. 2295, SEQ ID No. 2306, SEQ ID No. 2317, SEQ ID No. 2328, SEQ ID No. 2340, SEQ ID No. 2342, SEQ ID No. 2351, SEQ ID No. 2500, SEQ ID No. 3228, SEQ ID No. 3230, SEQ ID No. 3311, SEQ ID No. 3317, SEQ ID No. 3318, SEQ ID No. 3319, SEQ ID No. 3320, SEQ ID No. 3322, SEQ ID No. 3323, SEQ ID No. 3326, SEQ ID No. 3327, SEQ ID No. 3328, SEQ ID No. 3375, SEQ ID No. 3376, SEQ ID No. 3377, SEQ ID No. 3378, SEQ ID No. 3422, SEQ ID No. 3489, SEQ ID No. 3503, SEQ ID No. 3609, SEQ ID No. 3623, SEQ ID No. 3624, SEQ ID No. 3772, SEQ ID No. 3783, SEQ ID No. 3788 and SEQ ID No. 3794; or
b) said nucleotide sequence is selected from the group consisting of SEQ ID No. 5835 to SEQ ID No. 10784.

61. A nucleotide sequence, comprising a nucleotide sequence selected from the group consisting of:
a) a nucleotide sequence as claimed in claim 59;
b) a nucleotide sequence comprising at least 75% identity with a nucleotide sequence as claimed in claim 59;
c) a complementary or RNA nucleotide sequence corresponding to a sequence as defined in a) or b);
d) a nucleotide sequence of a representative fragment of a sequence as defined in a) or c); and
e) a sequence as defined in a) or c), which has been modified.

62. A polypeptide encoded by a nucleotide sequence as claimed in claim 58.

63. A polypeptide as claimed in claim 62, wherein:
a) said polypeptide is selected from the group consisting of
SEQ ID No. 61, SEQ ID No. 62, SEQ ID No. 67, SEQ ID No. 171, SEQ ID No. 221, SEQ ID No. 268, SEQ ID No. 288, SEQ ID No. 380, SEQ ID No. 426, SEQ ID No. 438, SEQ ID No. 448, SEQ ID No. 453, SEQ ID No. 455, SEQ ID No. 456, SEQ ID No. 458, SEQ ID No. 501, SEQ ID No. 516, SEQ ID No. 530, SEQ ID No. 542, SEQ ID No. 551, SEQ ID No. 720, SEQ ID No. 761, SEQ ID No. 762, SEQ ID No. 814, SEQ ID No. 859, SEQ ID No. 860, SEQ ID No. 861, SEQ ID No. 862, SEQ ID No. 869, SEQ ID No. 1079, SEQ ID No. 1168, SEQ ID No. 1174, SEQ ID No. 1176, SEQ ID No. 1413, SEQ ID No. 1414, SEQ ID No. 1415, SEQ ID No. 1416, SEQ ID No. 1417, SEQ ID No. 1457, SEQ ID No. 1651, SEQ ID No. 1856, SEQ ID No. 1869, SEQ ID No. 2021, SEQ ID No. 2080, SEQ ID No. 2152, SEQ ID No. 2162, SEQ ID No. 2173, SEQ ID No. 2251, SEQ ID No. 2295, SEQ ID No. 2306, SEQ ID No. 2317, SEQ ID No. 2328, SEQ ID No. 2340, SEQ ID No. 2342, SEQ ID No. 2351, SEQ ID No. 2500, SEQ ID No. 3228, SEQ ID No. 3230, SEQ ID No. 3311, SEQ ID No. 3317, SEQ ID No. 3318, SEQ ID No. 3319, SEQ ID No. 3320, SEQ ID No. 3322, SEQ ID No. 3323, SEQ ID No. 3326, SEQ ID No. 3327, SEQ ID No. 3328, SEQ ID No. 3375, SEQ ID No. 3376, SEQ ID No. 3377, SEQ ID No. 3378, SEQ ID No. 3422, SEQ ID No. 3489, SEQ ID No. 3503, SEQ ID No. 3609, SEQ ID No. 3623, SEQ ID No. 3624, SEQ ID No. 3772, SEQ ID No. 3783, SEQ ID No. 3788 and SEQ ID No. 3794; or
b) said polypeptide is encoded by a nucleotide sequence selected from the group consisting of SEQ ID No. 5835 to SEQ ID No. 10784.

64. A polypeptide, comprising a polypeptide selected from the group consisting of:
a) a polypeptide as claimed in claim 62;
b) a polypeptide exhibiting at least 80% identity with a polypeptide of sequence selected from the group consisting of SEQ ID No. 42 to SEQ ID No. 3855 or with a polypeptide encoded by a sequence selected from the group consisting of SEQ ID No. 5835 to SEQ ID No. 10784;
c) a fragment of at least 5 amino acids of a polypeptide of sequence selected from the group consisting of SEQ ID No. 42 to SEQ ID No. 3855 or with a polypeptide encoded by a sequence selected from the group consisting of SEQ ID No. 5835 to SEQ ID No. 10784;
d) a biologically active fragment of a polypeptide of sequence selected from the group consisting of SEQ ID No. 42 to SEQ ID No. 3855 or with a polypeptide encoded by a sequence selected from the group consisting of SEQ ID No. 5835 to SEQ ID No. 10784; and
e) a polypeptide of sequence selected from the group consisting of SEQ ID No. 42 to SEQ ID No. 3855 or with a polypeptide encoded by a sequence selected from the group consisting of SEQ ID No. 5835 to SEQ ID No. 10784, or as defined in c) or d), which has been modified.

65. A nucleotide sequence encoding a polypeptide as claimed in claim 62.

66. The nucleotide sequence as claimed in claim 58, wherein said nucleotide sequence encodes a polypeptide of P. luminescens having toxin activity or antibiotic activity, or is involved in the synthesis of toxins or antibiotics.

67. The polypeptide as claimed in claim 62, wherein said polypeptide is a polypeptide of P. luminescens having toxin activity or antibiotic activity, or is involved in the synthesis of toxins or antibiotics, or a fragment thereof.

68. A recording medium, comprising one or more nucleotide sequences as claimed in claim 57.

69. The recording medium as claimed in claim 68, wherein said recording medium is selected from the group consisting of a CD-ROM, a computer disk and a computer server.

70. A method of identifying primers or probes for determining genes in strains related to P. luminescens comprising
inspecting the sequences recorded on a recording medium as claimed in claim 68 and
identifying a primer pair or probe corresponding to a desired nucleotide or to a nucleotide sequence encoding a polypeptide with a desired function.

71. A method of studying the genetic polymorphism of strains related to P. luminescens comprising
obtaining a nucleotide sequence from a strain related to P. luminescens
sequencing the nucleotide sequence
comparing the nucleotide sequence to the nucleotide sequences recorded on a recording medium as claimed in claim 68.

72. A method for the automatic annotation of genes originating from a genome other than P. luminescens comprising
obtaining genomic DNA from a strain other than P. luminescens
sequencing the genomic DNA
comparing the nucleotide sequence of the genomic DNA to the nucleotide sequences recorded on a recording medium as claimed in claim 68 to assign putative function associated therewith.

73. A recording medium, comprising one or more polypeptides sequences as claimed in claim 62.

74. The recording medium as claimed in claim 73, wherein said recording medium is selected from the group consisting of a CD-ROM, a computer disk and a computer server.

75. A method of identifying primers or probes for determining genes in strains related to P. luminescens comprising
inspecting the sequences recorded on a recording medium as claimed in claim 73 and
identifying a primer pair or probe corresponding to a desired nucleotide or to a nucleotide sequence encoding a polypeptide with a desired function.

76. A method of studying the genetic polymorphism of strains related to P. luminescens comprising
obtaining a nucleotide sequence from a strain related to P. luminescens
sequencing the nucleotide sequence
comparing the nucleotide sequence to the nucleotide sequences encoding the polypeptide sequences recorded on a recording medium as claimed in claim 73.

77. A method for the automatic annotation of genes originating from a genome other than P. luminescens comprising
obtaining genomic DNA from a strain other than P. luminescens
sequencing the genomic DNA
comparing the nucleotide sequence of the genomic DNA to the nucleotide sequences encoding the polypeptide sequences recorded on a recording medium as claimed in claim 73 to assign putative function associated therewith

78. A primer or a probe, comprising one or more sequences as claimed in claim 57.

79. The nucleotide sequence as claimed in claim 78, wherein said primer or probe is labeled with a radioactive compound or with a nonradioactive compound.

80. The nucleotide sequence as claimed in claim 78, wherein said primer or probe is immobilized on a support by a covalent or noncovalent interaction.

81. The nucleotide sequence as claimed in claim 80, wherein said support is a high density filter or a DNA chip.

82. A DNA chip or a filter, comprising one or more nucleotide sequences as claimed in claim 78.

83. The DNA chip or the filter as claimed in claim 82, further comprising one or more nucleotide sequences from a cell from a source selected from the group consisting of a plant, an animal and a microorganism other than P. luminescens, wherein said nucleotide sequences are immobilized on the support of said chip.

84. The DNA chip or the filter as claimed in claim 83, wherein said cell is a cell or microorganism sensitive to a toxin or an antibiotic produced by P. luminescens, a bacterium of the genus Photorhabdus, and a variant of P. luminescens.

85. A kit for detecting and/or quantifying the expression of at least one gene of P. luminescens, comprising a DNA chip or a filter as claimed in claim 82.

86. A cloning and/or expression vector, comprising a nucleotide sequence as claimed in claim 57.

87. The cloning and/or expression vector as claimed in claim 86, comprising a nucleotide sequence selected from the group consisting of SEQ ID No. 3856 to SEQ ID No. 5825 and SEQ ID No. 5835 to SEQ ID No. 10784, or fragments thereof.

88. A host cell, transformed with a vector as claimed in claim 86.

89. A plant or an animal, except a human, comprising a transformed cell as claimed in claim 88.

90. A method for preparing a polypeptide, comprising
culturing a cell transformed with a vector as claimed in claim 88 under conditions which allow the expression of said polypeptide, and
recovering the resultant recombinant polypeptide.

91. A recombinant polypeptide obtained by the method as claimed in claim 90.

92. A method for preparing a polypeptide as claimed in claim 62, comprising
chemical synthesizing said polypeptide and
isolating said polypeptide.

93. An antibody selected from the group consisting of a monoclonal antibody, a polyclonal antibody, and a chimeric antibody, or a fragment thereof, wherein said antibody specifically recognizes a polypeptide as claimed in claim 62.

94. The antibody as claimed in claim 93, wherein said antibody is a labeled antibody.

95. A method for detecting and/or identifying bacteria belonging to the species P. luminescens, in a biological sample, comprising
a) contacting said biological sample with an antibody as claimed in claim 93;
b) detecting the formation of an antigen-antibody complex.

96. A method for detecting the expression of a gene of P. luminescens, comprising
contacting a strain of P. luminescens with an antibody as claimed in claim 93, and
detecting the formation of an antigen-antibody complex.

97. A kit for performing the method as claimed in claim 95, comprising the following elements:
a) said antibody; and at least one of either
b) reagents for constituting the medium suitable for an immunoreaction; or
c) reagents for detecting the antigen-antibody complexes resulting from the immunoreaction.

98. A kit for performing the method as claimed in claim 96, comprising the following elements:
a) said antibody;
b) reagents for constituting the medium suitable for an immunoreaction; and
c) reagents for detecting the antigen-antibody complexes resulting from the immunoreaction.

99. The polypeptide as claimed in claim 62, wherein said polypeptide is immobilized on a support

100. The polypeptide as claimed in claim 99, wherein said support a protein chip.

101. The polypeptide as claimed in claim 91, wherein said polypeptide is immobilized on a support

102. The polypeptide as claimed in claim 101, wherein said support a protein chip.

103. The antibody as claimed in claim 93, wherein said polypeptide is immobilized on a support

104. The antibody as claimed in claim 103, wherein said support a protein chip.

105. A protein chip comprising one or more polypeptide as claimed in claim 62 immobilized on the support of said chip.

106. The protein chip as claimed in claim 105, further comprising one or more polypeptides from a cell from a source selected from the group consisting of a plant, an animal and a microorganism other than P. luminescens, wherein said polypeptides are immobilized on the support of said chip.

107. The protein chip as claimed in claim 106, wherein said cell is a cell or microorganism sensitive to a toxin or an antibiotic produced by P. luminescens, a bacterium of the genus Photorhabdus, and a variant of P. luminescens.

108. A kit for detecting and/or quantifying the expression of at least one gene of P. luminescens, comprising a protein chip as claimed in claim 105.

109. A protein chip comprising one or more polypeptide as claimed in claim 91 immobilized on the support of said chip.

110. The protein chip as claimed in claim 109, further comprising one or more polypeptides from a cell from a source selected from the group consisting of a plant, an animal and a microorganism other than P. luminescens, wherein said polypeptides are immobilized on the support of said chip.

111. The protein chip as claimed in claim 110, wherein said cell is a cell or microorganism sensitive to a toxin or an antibiotic produced by P. luminescens, a bacterium of the genus Photorhabdus, and a variant of P. luminescens.

112. A kit for detecting and/or quantifying the expression of at least one gene of P. luminescens, comprising a protein chip as claimed in claim 109.

113. A protein chip comprising one or more antibodies as claimed in claim 93 immobilized on the support of said chip.

114. The protein chip as claimed in claim 113, further comprising one or more polypeptides from a cell from a source selected from the group consisting of a plant, an animal and a microorganism other than P. luminescens, wherein said polypeptides are immobilized on the support of said chip.

115. The protein chip as claimed in claim 114, wherein said cell is a cell or microorganism sensitive to a toxin or an antibiotic produced by P. luminescens, a bacterium of the genus Photorhabdus, and a variant of P. luminescens.

116. A kit for detecting and/or quantifying the expression of at least one gene of P. luminescens, comprising a protein chip as claimed in claim 113.

117. A method for detecting and/or identifying bacteria belonging to the species P. luminescens, in a biological sample, comprising:
a) isolating the DNA, or cDNA from the RNA, from the biological sample;
b) specifically amplifying the DNA of bacteria belonging to the species P. luminescens using at least one primer as claimed in claim 78;
c) identifying the amplification products.

118. A kit or set for detecting and/or identifying bacteria belonging to the species P. luminescens, comprising:
a) a nucleotide probe and/or primer as claimed in claim 78; and at least one of
b) reagents required for carrying out a hybridization reaction; or
c) reagents for a DNA amplification reaction.

119. A composition comprising one or more nucleotide sequences as claimed in claim 57.

120. A pharmaceutical composition comprising the composition as claimed in claim 119 and a pharmaceutically acceptable vehicle.

121. A biopesticidal composition comprising the composition as claimed in claim 119.

122. A composition comprising one or more polypeptides as claimed in claim 62.

123. A pharmaceutical composition comprising the composition as claimed in claim 122 and a pharmaceutically acceptable vehicle.

124. A biopesticidal composition comprising the composition as claimed in claim 122.

125. A composition comprising a vector as claimed in claim 86.

126. A pharmaceutical composition comprising the composition as claimed in claim 125 and a pharmaceutically acceptable vehicle.

127. A biopesticidal composition comprising the composition as claimed in claim 125.

128. A composition comprising one or more antibodies as claimed in claim 93.

129. A pharmaceutical composition comprising the composition as claimed in claim 128 and a pharmaceutically acceptable vehicle.

130. A biopesticidal composition comprising the composition as claimed in claim 128.

131. A method of preparing a toxin or an antibiotic comprising
culturing a cell as claimed in claim 88, and
expressing a polypeptide involved in production of a toxin or an antibiotic.

132. A genomic library of a bacterium of the genus Photorhabdus.

133. The genomic DNA library of a bacterium of the genus Photorhabdus as claimed in claim 132, wherein said DNA library is cloned into a plasmid.

134. The genomic DNA library as claimed in claim 132, wherein said bacterium is P. luminescens or P. luminescens strain TT01.

135. The genomic DNA library as claimed in claim 132, wherein said genomic DNA library is the genomic DNA library deposited with the CNCM on May 12, 2000, under accession No. I-2478.

136. A method for identifying at least one nucleotide sequence of P. luminescens not present in the genome of another species of bacterium or for identifying at least one nucleotide sequence of a genome of a bacterium of a species other than P. luminescens and not present in the P. luminescens genome, comprising:
a) aligning the genomic sequences of the other bacterial species with the nucleotide sequences of P. luminescens as claimed in claim 57; and
b) analyzing the data obtained by said aligning to identify and isolate said sequences only present in one or the other genome.

137. A method for identifying at least one nucleotide sequence of P. luminescens not present in the genome of another species of bacterium or for identifying at least one nucleotide sequence of a genome of a bacterium of a species other than P. luminescens and not present in the P. luminescens genome, comprising:
a) aligning the genomic sequences of the other bacterial species with the genomic DNA library as claimed in claim 134; and
b) analyzing the data obtained by said aligning to identify and isolate said sequences only present in one or the other genome.
